United States Patent Application Publication US 2026/0265781 A1 - sequence listing, part 13

SEQ ID NO: 118 - DNA, 18231092 bp, synthetic construct (residues 1-2,025,677 of 18,231,092)
  source 1..18231092: mol_type = other DNA; note = Hot spot 2 - Chr 3 contig ref|NW_020822577.1 from Cricetulus griseus
gtaggaaggtaatccttggtactagctttaggaatgtaatccttggtgctggctttaggaaggtaatccttggtgctagctttaggaaggtaatccttagtgctgactttaggaatataatcgttggtgctagctttaggaaggtaatccttggtgctagctttaggaatgcaatccttagtgctagctttaggaatgtaatccttggtgctggctttaggaaggtaatccttggtactagctttaggaatgtaatccttggtgctagctttaggaatgcaatccttggtgctaggtttaggaatgcaatccttggtgctagctttaggaaggtaatccttggtgctgactttaggaatataatccttggtgctagctttaggaatgtaatccttggtgctagctttaggaatgtattccttggtgctagctttaggaatgtaatccttggtgctgggtttaggaaggtaatccttggtactagctttaggaatgtaatccttggtgctagctttaggaaggtaatccttggtgctagctttaggaaggtaatccttagtgctgactttaggaatataatccttggtgctagctttaggaaggtaatccttggtgctagctttaggaatgcaatccttagtgctagctttaggaatgtaatccttggtgctggctttaggaaggtaatccttggtactagctttaggaatgtaatccttggtgctagctttaggaatgcaatcgttggtgctaggtttaggaatgcaatcctttgtgctagctttaggaaggtaatccttggtgctagctttaggaatgtaatccttggtgctagctttaggaatgtattccttggtgctatctttaggaatgtaatccttggtgctgggtttaggaaggtaatccttggtactagctttaggaatgtaatccttggtgctagctttaggaaggtaatccttggtgctagctttaggaaggtaatccttagtgctgactttaggaatataatccttggtgctagctttaggaaggtaatccttggtgctagctttaggaatgcaatccttagtgctagctttaggaatgtaatccttggtgctggctttaggaaggtaatccttggtactagctttaggaatgtaatccttggtgctagctttaggaatgcaatccttggtgctaggtttaggaatgcaatccttggtgctagctttaggaaggtaatccttggtgctagctttaggaatgcaatccttggtgctagctttaggaatgcaatccttggtgctagctttaggaatgtaatccttggtgctggctttaggaaggtaatccttggtactagctttaggaatgtaatccttggtgctagctttaggaatgcaatccttggtgctaggtttaggaatgcaatccttggtgctagctttaggaatgcaatccttggtgctagctttaggaatgcaatccttggtgctcgctttaggaaggtaatccttggtgctagctttaggaatgcaatccttggtactagctttaggaaggtaatccttggtactagctttaggaaggtaatccttggtactagctttaggaatgtaatccttggtgctagctttaggaatgcaatccttggtgctagctttaggaatgcaatccttggtgctagctttaggaaggtaatccttggtactagctttaggaaggtaatccttggtactagctttaggaatgtaatccttggtgctagctttaggaatgcaatccttggtgctagatttaggaatgcaatccttggtgctagctttaggaaggtaatccttggtgctagctttaggaatgcaatccttggtactagctttaggaaggtaatccttggtactagctttaggaatgtaatccttcgtgctagctttaggaaggtaatccttggtgctagctttaggaatgtaatccttggagctagctttaggaatgcaatccttggtgctagctttaggaatgtaatccttggtgctgactttaggaatgtaatccttggtgctagctttaggaaggtaatccttggtgctagctttagtaatgcaatccttagtgctagctttaggaaggtaatccatggtgctagctttaggaatgcaatccttagtgctagctttaggaaggtaatccttggcgctagttttaggaatgcaatccttggtactagctttaggaaggtaatccttggtactagctttaggaaggtaatcctttgtactagctttaggaatgtaatccttggtgctagctttaggaatgcaatccttggtgctagctttaggaaggtaatccttggtgctgactttaggaatgtaatccttggtgctagctttaggaaggtaatccttggtgctgactttaggaatgcaatccttggtgctagccttaggaaggtaatccttggtgctgactttaggaatgtaatccttggtgctagctttgggaaggtaatccttggtgctagctttaggaaggtaatccttggtgctagctttaggaatgtaatccttggtgctagctttaggaatgcattccttggtgctagctttaggaatgtaatccttggtgctgggtttaggaaggtaatccttggtgctagctttaggaaggtaatccttggtgctagctttaggaatgtaatccttggtgctagctttaggaatgtattccttggtactagctttaggaaggtaatccttggtgctagctttaggaatgcaatccttggtgctttaggaaggtaatccttggtactagctttaggaataatccttggtactagctttaggaatgtaatccttggtgctagctttaggaatgcaatccttggtagctttatcccttggtgctagctttaggaaggtaatccttggtaagccttggtgctagctttaggaatgtattccttggtgctagctttaggaatgtaatccttggtgctgggtttaggaaggtaatccttggtactagctttaggaatgtaatccttggtgctggctttaggaaggtaatccttggtgctagctttaggaaggtaatccttagtgctgactttaggaatataatcgttggtgctagctttaggaaggtaatccttggtgctagctttaggaatgcaatccttagtgctagctttaggaatgtaatccttggtgctggctttaggaaggtaatccttggtactagctttaggaatgtaatccttggtgctagctttaggaatgcaatcctaggtttaggaatgcaatccttgtgctagctttaggaaggtaatccttggtgctagctttaggaatgtaatccttggtgctagctttaggaatgtaatccttggtgctagctttaggaatgtaatccttggtgctagctttaggaatgcaatccttggtgctagctttaggaaggtaatccttggtgctagctttaggaatgtaatccttggtgctagctttaggaatgcaatccttggtgctagctttaggaatgcaatccttggtgctagctttaggaatgtattccttggtgctagctttaggaatgtaatccttggtgctgggtttaggaaggtaatccttggtactagctttaggaatgtaatccttggtgctagctttaggaaggtaatccttggtgctagctttaggaaggtaatccttagtgctgactttaggaatataatccttggtgctagctttaggaaggtaatccttggtgctagctttaggaatgcaatccttagtgctagctttaggaatgtaatccttggtgctggctttaggaaggtaatccttggtactagctttaggaatgtaatccttggtgctagctttaggaatgcaatccttggtgctaggtttaggaatgcaatccttggtgctagctttaggaaggtaatccttggtgctagctttaggaatgtaatccttggtgctggctttaggaatgcaatccttggtgctaacttaggaatgtaatccttggtgctagctttatgaatgcaatccttggtgctagctttaggaaggtaatccttgttgctgagtttaggaatgtaatccttggtgctagctttaggaaggtaatccttggtgctggctttaggaatgcaatccttggtgctagctttaggaatgcaatccttggtgctagctttaggaatgtaatccttggtgctgctttaggaatgtaatccttggtgctggctttaggaaggtaatccttggtactagctttaggaatgtaatccttggtgctagctttaggaatgcaatccttggtgctaacttaggaaggtaatccttggtgctgactttaggaatataatacttggtgctagctttaggaaggtaatccttggtgctagctttaggaatgcaatccttggtgctagctttaggaatgtaatccttggtgctggctttaggaaggtaatccttggtgctagctttaggaatgtaatccttggtgctagctttaggaatgcaatccttggtgctaggtttaggaatgcaatccttggtgctagctttaggaaggtaatccttggtgctagctttaggaatgtaatccttggtgctggctttaggaatgcaatccttggtgctaacttaggaatgtaatccttggtgctagctttatgaatgcaatccttggtgctagctttaggaaggtaatccttgttgctgagtttaggaatgtaatccttggtgctagctttaggaaggtaatccttggtgctggctttaggaatgcaatccttggtgctagctttaggaatgcaatccttggtgctagctttaggaatgtaatccttggtgctgactttaggaatgcaatatgtggtgctagatttaggaatgtaatccttggtgctggctttaggaaggtaatccttggtgctagctttaggaatgtaatccttggtgctagctttaggactgcaatgcttggtgctagctttaggaatgcaatccttagtgctaggtttaggaagttaatccttggtgctagctttaggaaggtaatccttggtactagctttaggaatgtaatccttggtgctagctttaggaatgcaatccttggtgctaggtttaggaatgcaatccttggtactagctttaggaaggtaatccttggtactagctttaggaaggtaatccttggtactagctttaggaatgtaatccttggtgctagctttaggaatgcaatccttggtgctagattttggaatgcaatccttggtgctagctttaggaatgtaatccttggtgctagttttaggaatgcaatccttggtactagctttaggaaggtaatccttggtactagctttaggaatgtaatccttggtgctagctttaggaaggtaatccttggtgctagctttaggaatgtaatccttggagctagctttaggaatgcaatccttggtgctagctctaggaatgtaatccttggtgctgactttaggaatgtaatccttggtgctagctttaggaaggtaatccttggtgctagctttagtaatgcaatccttagtgctagctttaggaatataatccttggtgctagctttaggaaggtaatccttggtactagctttaggaatgtaatccttggtgctagctttaggaatgcaatccttggtgctagctttaggaaggtaatccttggtactagctttaggaatgcaatccttggtgctagctttaggaaggtaatccttggtactagctttaggaaggtaatccttggtactagctttaggaatgcaatccttggtgctagctttaggaatgcaatccttgtgctagctttaggaatgcaatccttaggctagctttaggaatgcaatccttggtgctagctttaggaatgccttggagccttggtactagctttaggaatgtaatccttggtgctagctttaggaatgcaatccttggtgctagctttaggaaggtaatccttggtgctgactttaggaatgcaatccttggtgctagctttaggaatgtaatccttggtgctagctttaggaaggtaatccttggtgctagctttaggaaggtaatccttggtgctagctttaggaatgcaatccttagtgctagctttaggaatgtaatccttggtgctggctttaggtagataatccttggtactagctttaggaatgtaatccttggtgctagctttaggaatgcaatccttggtgctagctttaggaatgcaatccttggtgctcgctttagaaaggtaatccttggtgctagctttaggaatgcaatccttggtactagctttaggaaggtaatccttggtactagctttaggaaggtaatccttagtactagctttaggaatgtaatccttggtgctagctttaggaatgcattccttggtgctagctcaatccttggtactagctttaggaaggtaatccttggtactagctttaggaatgtaatccttcgtgctagctttaggaaggtaatccttggtgctagctttaggaatgtaatccttggagctagctttaggaatgcaatccttggtgctagcttaggaatgtaatccttggtgctgactttaggaatgtaatccttggtgctagctttaggaaggtaatccttggtgctagctttaggaatgcaatccttagtgctagctttaggaatataatccttggtgctagctttaggaaggtaatccttggtgctagctttaggaaggtaatccttggtgctgactttaggaatataatccttggtgctagctttaggaaggtaatccttggtactagctttagttgcaatccttagttctagctttaggaatgcaatccttggtgctagctttaggaatgcaatccttggtgctagctttaggaaggtaatccttggtgctggctttaggaagataatccttggtactaactttaggaatgtaatccttggtgctagctttaggaatgcaatccttggtgctagctttaggaatgcaatccttagtgctagctttaggaatgctccttggtgctagctttaggaatgcaatccttggtgctagctttaggaatgtaatccttggtgctggctttaggaagataatccttggtactagctttaggaatgtaatccttggtgctagctttaggaatgcaatctttggtgctagctttaggaatgtaatccttggtgctgactttaggaatgcaatccttggtgctagctttaggaatgtaatccttggtgctagctttaggaatgtattccttggtgctagctttaggaatgtaatccttggtgctggctttaggaaggtaatccttggtactagctttaggaatgtaatccttggtgctagctttaggaagggtgctagctttatgcagccttaggaatgcaatccttggtgctagctttaggaatccttggtgctttaggaaggtaatccttggtgctagctttaggaatgcaatccttggtgctttaggaaggtaatccttggtactagctttaggaataatccttggtactagctttaggaatgtaatccttggtgctagctttaggaatgcaatccttggtgctagctttaggaatgcaatccttggtgctagctttaggaaggtaatccttggtactagctttaggaaggtaatccttggtactagctttaggaatgtaatccttggtgctagctttaggaatgcaatccttggtgctagctttaggaatgcaatccttggtgctagctttaggaaggtaatccttggtgctagctttaggaatgcaatccttggtactagctttaggaaggtaatccttggtgctaggtttaggaatgtaatccttggagctagctttaggaatgcaatccttggtgctagctttaggaatgtaatccttggtgctgactttaggaatgtaatccttggtgctagctttaggaaggtaatccttggtgctagctttaggaatgcaatccttagtgctagctttaggaaggtaatccatggtgctagctttaggaatgcaatccttagtgctagctttaggaaggtaatccttggcgctagctttaggaatgcaatccttggtactagctttaggaaggtaatccttggtactagctttaggaaggtaatccttggctttaggaatgtaatccttggtgctagctttaggaatgcaatccttggtgctagctttatccttggtgctgactttagccttggtgctagctttaggaaggtaatccttggtgctagctttaggaatgcaatccttggtgctagctttaggaaggtaatccttggtgctgactttaggaatgtaatccttggtgctagctttgggaaggtaatctttggtgctagctttaggaatgcaatccttggtactagctttaggaaggtaatccttggtactagctttaggaaggtaatccttgatgctagctttaggaaggtaatccttggtgctagctttaggaatgtaatccttggtgctagctttaggaatgtattccttggtgctagctttaggaatgtaatccttggtgctgggtttaggaaggtaatccttggtactagctttaggaatgtaatccttggtgctagctttaggaaggtaatccttggtgctagctttaggaaggtaatccttagtgctgactttaggaatataatccttggtgctagctttaggaaggtaatccttggtgctagctttaggaatgcaatccttagtgctagctttaggaatgtaatccttggtgctggctttaggaaggtaatccttggtactagctttaggaatgtaatccttggtgctagctttaggaatgcaatccttggtgctaggtttaggaatgcaatccttggtgctagctttaggaaggtaatccttggtgctagctttaggaatgtaatccttggtgctggctttaggaatgcaatccttggtgctaacttaggaatgtaatccttggtgctagctttatgaatgcaatccttggtgctagctttaggaaggtaatccttgttgctgagtttaggaatgtaatccttggtgctagctttaggaattccttggtgctagctttaggaatgtattccttggtgctagctttaggaatgtaatccttggtgctgggtttaggaaggtaatccttggtactagctttaggaatgtaatccttggtgctagctttaggaaggtaatccttggtgctagctttaggaaggtaatccttggtgctgactttaggaatataatccttggtgctagctttaggaaggtaatccttggtgctagctttaggaatgcaatccttagtgctagctttaggaatgtaatccttggtgctggctttaggaaggtaatccttggtactagctttaggaatgtaatccttggtgctagctttaggaatgcaatccttggtgctaggtttaggaatgcaatccttggtgctagctttaggaaggtaatccttggtgctagctttaggaatgtaatccttggtgctggctttaggaatgcaatccttggtgctaacttaggaatgtaatccttggtgctagctttatgaatgcaatccttggtgctagctttaggaaggtaatccttgttgctgagtttaggaatgtaatccttggtgctagctttaggaaggtaatccttggtgctggctttaggaatgcaatccttggtgctagctttaggaatgcaatccttggtgctagctttaggaatgtaatccttggtgctgactttaggaatgcaatatttggtgctagatttaggaatgtaatccttggtgctggctttaggaaggtaatccttggtactagctttaggaatgtaatccttggtgctagctttaggaatgcaatccttggtgctaacttaggaaggtaatccttggtgctgactttaggaatataatacttggtgctagctttaggaaggtaatccttggtgctagctttaggaatgcaatccttggtgctagctttaggaatgtaatccttggtgctggctttaggaaggtaatccttggtgctagctttagaaatataatccttggtgctggctttaggaatgtaatccttggtgctgactttagtaatgcaatccttggtgctagctttaggaatgtaatccttggtgctggctttaggaaggtaatccttggtactagctttaggaatgtaatccttggtgctagctttaggaatgcaatccttggtgctagctttaggaaggtaatccttggtgctgactttaggaatgtaaaccttggtgctagctaggaaggtaatccttggtgctagctttaggaatgcaatccttggtgctagctttaggaatgtaatccttggtgctggctttaggaaggtaatccttggtactagctttaggaatgtaatccttggtgctggctttaggaaggtaatccttggtactagctttaggaatgtaatccttggtgcttgctttatgaaggtagtctaatagtttttagcaaggcagagggaatggggagaagggcaactcgcgcgcgcgcgcgcgcacacacacacacacacacacacacacacacacacacacacacacacacacaccccaaacccagaatttgagctagctagccaatcactttaccactaatctgtatctcaacctttggttttttcagactgggtctcacttgtagcccagattggccttaaattggtcatcctcctgtctgttccttcagactgctaggatcataggtgtgtaggtgattttggtgtatgtaataggtgtgaaggtgatttgaggtatatgcatccagtcccctccactaaatgtgaatgatggaatattaggaactctacttacaagcacctccacagtgtccggaatgtcttcccaggtctttgtcttcgactagaactttccctgcattaaagcagccactaggaggtgacacttttaatgccttgtgtctctgtgtggctgtctccagagataaactgaatgcagtgatgagggctgttaatggcagcacttggaaggtaaggcaggcaaatctcaagttcaaggccaatatgggttacagagcaaagccctgcctcaaaaaccaacaggaccaagagagctctccagagtcagcgttctgtgtcagtggccagaaaaacagaatctccttgatcttgtcactctcaaggggcatgttcgttttgctaacaggcccacaggtatgttatgatgctttgcctgtgtctatagtgccaaggagaatcaagcatgactgctgaggtcaaggtcaaggcaagatgcccacctgactctggtccctgtgccctctgccaccaccccagtccaatgtccttgcctccttggactaagtggagaggacacagaacccaaaggcccctctgtatctccatctccatgcaagactcgccctgcatccccagcctgggaatctccccaggcccgtgtgctgcctgtaccttgggctggtgacagcgatcacaccctacataggactaatgaacttcccaggcctgttgggcaactctgccttgggaaaacatccaatgcagagctggggctagccccatatcacagcacactttgtgatgagtcagacttagcaaacagacgttcccactgctgaggatagggacacagctttctccaaagctgtctctgatggtcttacagcgtagtgcctgctggcggctctgcaggttggcttaagcttctagcatggctcttttggggtcaggtctcatttgttcaacctgtgcaggcacacagaggtatcatggatgacccaatcattttttaacttgtgtttggagtgagttagctggtttgttctaggcaggtcatttacctaatgatgcttactctagggtcatgctagagaaggtggtcaagtgagtcctggagatgggaggggaagagagagccagcaggcaggttggagagcactgtgttccatatcctcggtgatcagacgcccctgcccagggcctggtgattggttgtgtggcctatggtcaacacatacagccatctttctgtgtcctgctttcctgggatcatcaaggagcaaagctggctgaaaaggagctgctgcttgtgtctaggaagtacgaagctgtgccccaaacatgttaaaaggtggggtttaatctctccccacaagcaggggaagtccgttgtgtcacccccacacacacaccccagaggggagcaggttccgggagcctgctgatagccagtgccttgttgctctccatgtatggtatgagggcttttataaaagagtccaagggacttgtttgttccttctcctgtgtgaggacagctaaagggcaccatctgtgaaccacacatggagtccatctagtgtcttgatctaaattctcccagtctcctgaagtgtacaagtcctgttgtttctaagaagtccagcccctgaatggattaaacagtggaagacaagagacagctgtcaaggtattctgaaacctgtaacgtcctacgcagtggttagctatcaccgacttagtgtgacacaggggtgtgcaccagacatgccctctctacagtccccttagggcatgaagggctgtgttctcagcacccaagaggtgctagattcaggcgtgtacctgattattgctattctggttctgacttagatggagacggataagaatccagggtgaggtggactgccttcctggtttcccagcatttggtggaatgtactaatagttgtagattttggcatctttgagtgcctgtgcatggccacccctaagctccaactttcccattttgccatcttttcctggagaaggtaggacgggtcgtgattaaactctgaacgactgtgaattcccttccttgttctgtgtgcttgctttcatctcttggtcttttctatgatctttaatttacatcttaaactactgggcctctgagatcaatggctggttcttttggggagaccagagagctaactgtcaggctctacttgttgctaaggaaagagaacaagttcatccaggtgttctcaaacagcctgctcaggcttaacaccagcctctcaattcccaagtcaccacaggcatgtgctctcctgacccatccagacccagtgacggtccagtcctcattccgcgtagagaacagtccatctgagttgccataacaccacacactgaatagcttataggcaacaaaattttctcacagctctggagacgagaaatccaagcttaagcctccagcagtctccgtgtgtggtgagagcccatttcctggttcacatggcagacataatagaagccctccaagggcctctaccatcatcttgtaaatggaatgtgtcaccctattacctagtcatccccaaaggcccccagttcctaagcccagcacagtgtggatcagcgttcaacctaccaatgaggttaaggtttgcacaaacgttcagtctatacagcaaaccacaattagtccctcacctccaaagtcttccttcaaccaacccctgcctcctcccacaccttcccaggggtcatatgcttcgtgatacctggtaaatttctaattatcttcagtggacatctcttccttccttccttccttcctttctcccttttcattttgtttgtttttgagacagggtctcactatgtagttctggctgtcctagaaatcactatgtagatgaggcttcctcggcctcccaagtgctgggactaaaggcgtgtgccactacatctagctgacatctgtttcttaatgattgaggggttggggccaacaaggtgactcagaggataaaggtgcttgccacacaagcctgacaacctgaatacaatctccagaagccatggaggtagaaggagagaagtgagtgactccacagagctgacctctgatctccacacacacacccaacaatgataactatcactagtccacatgctcaccatggcccacccctaatagtaataataatagctcagaggagagatggctcataaaagccagtactggctgcacttccagaagacccatgccctggctcaccaccatctctaactcagttccaggggatcctgtgccctcttctgtcctcctgatgctccagccatactgtggtgcacagacatacgaaaaacactcaaacacagaaaataaaataagtaatatgaatgttcaatccaaaagaagacagaaaaggaaagaacagagatgagacacacaggaaaccagctacgcacaccctcaagcacaggtggatagcacacctcccaaccaaatctggggaaaggccacctggttctcccggatcacaaagtgaattaggtgagtcacagctacaccagacactctccaggggcaaccttcggaatgttatcctggaggatacagttcctagaagatacagcccttgggctttcttggaaaacccaccaggtcagtgtgtcaagaataacctcgaggaacactctgtgtccagagaggagccaccttgccgggacagagggtgaggccctatggcgcctatgtctcagcatcttctcatggaagccaaaagggatggggtctacttagcctagcatgaaaatgtgtgttcaatggagagaggaccaggcaccgtgtggcattatttttcctggatagtacctctaatcacctcagacagagagggcgacagcaagccagggaaaggatgccacccaagtccatctgcgtgaatttagtgggttcccttacagagcatgtgttgtgtcatcaagaagcccatctggtcactagagctacattgctggagtccccactttgccactcctccaccttgtacatgctccagcattcccaagaccaaggcagctctgtgtgtgtggagaggggagcagaaggctggagtctgaggattttcccacattctcttaggaggagctattgatagggcctgatctcggggaggctctattgggtaatggcagctgctcagatttctagacaggaaggctatttcgtggcccagtacagtgttccctgacacacagatgggctgattagattagccagccgcatctgggaaacactgagcctggaaagaaggagagttgaacagcaagattcctgcatgatttgggcagagaagcgcccacaggtggaaggaggggccttgctgaggcccctgtgaataattggcggtgaattgtctttttcaattgcaaactctccaatttagactggctgatagaatttggcatatcagaaaaaatacataacagtcaaaatgacacaaagttagcaatattgttgtctgtcactcctgctagaatacagtaagctctgagtaccccagacagcacagaaggaacgctgcttggccttttataccacagccagtagacagcctgcttgtgacctcggagccatctcttccatgctccaagacatgggtcttaggagttccagtcagaactgaaggttttgtttgctgggggtactggctctgtgttttgttgttgttgttgttgttgttgttattttgtttttttgttatgttgttattttgttgttatggtttttttgttgttattgttgttttgttttttgagacagggtttctctgtgtagcctgtagaccaggctggcctcaaactcaagagatttgactgcctctgcctccagagttctgggattaaaggtgactgcctaactaatgcaggctctgtgttacatagttctttgttcttagaagaaaaatgttcgaatcccccgtggcatgactggcttgatgcagcatcctggcccaattctcagctgaacaaagaaaagcaaaaagacactcacacattaacctggctttgctggtgccctgtggaaggtttcccagggacagagagtaaataggaaacggggttccagccccaggaaattccactcgaaatcgaagctgactgtgttcctgctagctaccacagcaggctctgagtctgccggggtcctagcaaaagctctcagggagcctagtggggaccagttggaaagaggaaaccattcgccgcccatgtgtgtcctctttccctaccgggaggtgattgtgggtgtttctttgccaggaagcaggtcatttcctgccagatgacttaggatccaaactggaggacacttgggttgttcctgaatcgaggctattgtgaataattcgcaatgaccatgagcgtgcagaggtctctgacacgcccattctacttcctgtccacataataaccgtgaatgggactgcgtgtcgtttgttgctctgttgtttacttcttgagaaacctgcagaaagccctctgtgatagtgtgccatggatgtttgtagcagtgtgcagtctccacactcgtgacagcatttgctattgcttggctttttggtgtctgctgacaggtgtcaggcggcacctcacttgcgtttttctgctgatagtgtccagagcctattttctctttcatcaagttttgaaaatatctattcaggcttttgcccatttaatgtgtttatttgatgttttgtcttgtttttgctgatactactcgttcaatttttctgtggatctgtaacacactaaaaaataaaatctactgaagacgaatccctcaaaagttgtaaataagtaaagtgtggagacccggcaatgcttccatacagaggagccacgagtcacttgtgtaggcactgaaccctcaaggagtagaagccccactcaagtgtgggctgaacaaacagctcagagggtaaaaagcattagctgctcttgaagaagacccaggtttgaaacccggaacatggcagctcacaatggtctataagtctagttctaggggctcagatgccctttttggcttctgtagacaccaggaactcacacggcacccagacacacatccagacatatgcacatctacataaaacaaaataaaccttttttaaagtatcatgtaggaaagtgcgagggagagactttgaggtgaggacagtggcaaacaccgcctccgtctgtgaccaagggcatattagcagtgacagatcacggcacttgaggggctatgttgacaatggaacctcacctctggggcttcttctctaaaactataggcctcaagtaaccaagagaaaaccaccagagtgtcctcaccagagagatgttctacaagatacttggtctgtactcaagactgccaggatagtaaaaatcaggggaagtgtgaacagtcaaggttagaggggcttgaggaggcagtgacaacccaacagggccccagaataacaaaggccgctgggtaagagtagggaaaccaaatggccatgaggcagcattggtccgtcagttgtgtcaatacactaatgccataacatgctaatgaccaggcatgggtattccagaacttgctctactgcccgtgtaggtttcctataaatccaagccattctgagaaagatttttgttttaaaaacaataggcctggatgcagctcagttgacagaatgctttcatagaatgtcgaaggcccaggatttgaccccgtgctgtataaactgggtatggctgaacatggctgtagtcccagcacccaggaggtggtgagttcaaggccaacccaggctaagaccctgtctcaaagaaatattactttttgagcatgtccatgtggctttgctatagcgcctgctggcccttagagactgttggccacaggagcatggggtgtgaagcagcgctgacctgtgtggagcggggagcatggggtgtgagggaggaagttactcaccagtgggtgactctctttccctagatgtgtgcttgtatttttagcattgtcatgcgggtcacagttcagagggcagagggtgtgtatgttgtcgtggttgccatagtccgtgtggccacagaaaaaccccataaactaggagacctaagcagtaaaaatttatttcttcagagtcctgggagccggtagtctaagttgccacgggggactgcagccttgtggctgttcacacttaaccatcagtgaggccaagctagcttatcccattttctacccaagtgtgtgcttttgttttccttattttaatggtttgcttcaaacacagactactacattcttctaaaattttttgttgtgggaaagcatacaccataaaactttctaacctttttaagtgtgcagttcaatcaagactgttacttttaaagtttgttttgtggactgatctgaatttaactggtggcctatataagcatggtgtaataatgtctgttgaagaaagaaatgaaaagtcgctcaatgcctgggaacctccaaacccagagagagcaaagttttctttactttttttaaaaaaaaaactattgtgctaggtcaatggccacaagtttccttttgaaagaaaccccagtgatttggacaatggtgggcactggcagacacctcaataggtggctcactgtgcatcctgcctctgattcctatgctgtacagaagacagacattccttggtttctctgagacctctggagaggaagggagaaaacgtgggctaatgctgttcctgtctggggtaggggagtggggggagcagtcagtgagtacagtgcattctgggaagggaagtcagggggctgctctctggagcagactttctcgaaggctgtgtgctcagcctgctgaggctgtgcctgtgaagctctgtcagctggttggcaagcaaaagtacccaaacatacacaggtcaaaaacccgtttaagccggtgtggtgtcacacacaccactgatcctagcactcgggaggcagaggcaggtgggtctctgtgagttcaaggccagcctggtctacagagggaattctagaacaggctccaaagcaatacagagaaactctgtctcaaaaaacagagagagagagagagagagagagagagagagagagagagagagagaactcgacttagattcccagtatccataatgggcagctcacaaccgactgccttaactctaactccagggaaacataacatcctcttcttcttgcctccgtggacacacacacacacacacacacacacacacacacacacacacacacacacacaaataatttttttaaggccaggaatggtggtgcacaacttaatcccagcaccggggacatagcggcagactgatctctataagtacagggtgagttccaggacaaccaagggttacataaagaaatcttgtctcaaaaaaaattgttttttaaaggtcaattggaattgctatgactagattatgcaacagcaacaagcaacactgagcagtccagcctgagtcaggctggctggggctcgttttggtttctcccaagcttctgtggtctccattattaatctctttacccattggtgttggccttgccttttcgccagcaaagagggcttctgtgcagagtgcctccaggcaggctgcccccaccccaggaaacagcgtgcccctttatttatggtctctccttttctcccatcaaatcagatttgctttctccactgaggtggaagagacaaagccttgtgtttaatatgcagaagcagttgctcacatccaagccctattatccctgcagaaacactcctctccttgctctaaagccctttgctgttgtctcattgcaagggtatgcttacctgcttcattgctgagtcttacagaataacgcagaagggagtaagggaagacactgctactctcatcttctgacgacaagttatctcactgagttttgtttttttgtgtttgagactagcttcaaaactctccgcatagtgaaggatgatcctgaattcctaatcatcctgtctccacctccccgttgctaggataatcatgttgcaccacccagatcactgaggttttaatttcttttcttggatgtacaaaagaaaaaaaaatcatgtaaaggaattgcaagtaaatatttagatacaaataaagaatacttatatattgggccagcaagatggctcagcaggtaaaggagcttgctgccaaggttaagggcctgagtttgatccttgagacccacaaggaaggagagaaccaactccacattcatgccctggaacacatgtactgtccccccaaatagagtaaatgaaaaagataaaaataaaaaagcatcagagtttatgcttaataaactcacacagtttattaagtcactactagatcgtggacactctagggcaacaacatctgctgagcatggtggtggccgacaccttccgaaggcagaggtaggcggatctctgtgagtttcaggacagccacagctacacagtgagaccctgtcttgaaacaaaacacaacacaacaaaacaataaaaaacaacatccaagaggcacatgggtaattttaaatggtctagcagccccatttttaaaagtggttgagccaggctgtggtggcatacacctttaatcacagccctggggaggcagaggcagatggatctgtgttagtccagcctggtctatagtgagttctaggacagccagggctgttacacagagaaatcctgcttcaaaaaacaccaaaacagttttcctctgtggtcagttggttagtgagggtgtgtggtgataagaaggtgaaaagtttgatcctctactactttcgttgctgggcgtggcacacacctttaatcctagcactcgggaggcagaggcaggcggatctctgtgagtttgagaccagcctggactacagagcgagtgccaggacagcttccaaagccacagagaaaccctgtctcgaaaaacagaacaaaacaaacaacaacaaaaacaaattggttgaaaccaataaaacaatcacattgtcatttaaatatgtaataaatattaagttaatgagatatttaactttcatgtgaacctttgggtctggtgattttatactttctgcacatcttaatgagcagctttcacgtgggatgggttacttctagaaggtctctcgttctttcattctcaccaaccaggaagaagttcccagaggcttgtctctcccaagcctcctattgctggctaattaaatccctaagcaacggctgagtcactctcaacttcggaaaaacaatttaagaaatctgtctcagagccaagaatgcagctccccacgtacaaggagggaggtgaggagatgagaggccttggaggaagacgcgtgcagagccaggtgcttctgtgtgggagggaagaggtaagccatccctgaggcctccggagagcagagcagagaaagggtcccagctgagtcgtgttcctttgtctttacagcccctccccgaggcagggcacattgtctcatttcatggagacagaatcccagatcactcacgtctggctcctcatctaattcatagcccctgagctctggtcaagcctggccacagtgtgcataacctttggtacacaacaggtccaagtgcacagtgtttacgtagactgtgttatctgcaggatgcacagtctatttgcaggtgcatctcagctctgaaaccgtctccaagcttcccagtaaaggccctgtttcctgaacctcctctgcctttccttttcatccacccactactcgaggtagactcagcagtgtgaggattggaggggacgggagagtgagataacagagacggatacagacagtcacccaggctgaagatccacacgggagcctgcaggtctgtggcatccaattgtggggagaagaggagggtttgccggaagttcatttgtctcagaatgtcctattgagctcagtccttgtacggtgagcgttagctccactaggcaatccagagagaaggcattttctcccaaagaccctggtaacatgaagcaaggctaatctggaggcagccaggaggagcagctgagcgtgccctctctggagccatatggcttctgttgacaccctggctggccactttgtagctgtgccacctcggacagttgactgaagtgtctctgcttcaggctcttttcaaaaaagatgtacttgtttttatttgaagcatatgtgctctgcttgcccacatgtatgtgtactgtggacattcagtgcctgagggggccggaagagggcgtcaggtcccctggaactggagttacagatgactgtgagcctgggtgctgggaactgagcgtctctctggcccctctaattcagactcttcattttaaagctgaaaatgggataattttatcaggtagggttttctggggggtgagctaagacgaggcttcacagagcttggagagttggcgcttgagaacctcttgatgtgggtagcacgcagatgccctgcgattctttgcatggaccctcacctcagagccagcggggagtttgtcaagtatgaatgtccagactgaggggtaaacccttctggaagagcagactcacttttacgagtctcaaacaagtcttatttgtcctctattccacggcactggtgtaccagaatactaaacacccatctgaatggtaccaaaaataaccagaggccaagctatgtggtgggaaagacaggctgtggaactagacaggtctctaggggaactctgtccctatctcttgcaggccttgtctgagcctgtcccctcatcattgcagtgaagagtacgacagctttctctaagcttgggctgaggattacttagacctggtgtcttatggtctgtaaataaggtcaggatgaagcattcattttattaacgcaggctccagagagtgtccctggcatcaggggagctgtccagccctgtgcctggcatggcaaggaactgagttttctgcaggaagaactagtgactggacattggtgggcagatcattgaggaccagtggtgcaggcagtagagaaggtcctctatgggatttttcctcctccctcctccccttcctcctctccttcctcctccccttcctcctcctcttctccgtgctatcactgttttccacccctggatccttttttactttttatttggagacagggtcacactgaatcacccagactgaacctgagctttggatcttcctgccttagactcctgagcctctggggctgcaggcctgactcactggcttgcgattttactgagatacattccagaccctaaagttgttgttgtttttgtttgtttctttgtttcatcgataacacaatgtgggaatcctagcacattttcattttatatctgtaggagagccatgagtttcctctcacccacaagacaatcctttaacaagacataaaatgaaatgggttgaaaagtctctttcttttctttctaccttgatgatttgggagggcaagatggggaacaagacactaccaagttcctgttgtcagtcagagggagccttccctctcccctgggcagagtctgtggactgcctgaggcctgctccccagttggcatcaggcccaaccttctgtggtgcaacagtgcctggtttcaaatcaggactctatttgtttctgtgtctcagttggtacaatgcttcctatcacacataaagacctgggttcagcttccagcactgtatggaagggggacagaggcaggaggatcagaattcaagggggaagagagacgggagggaggggaaggagaaatggaggaagggagggaggaggaggaagaggaggggaaggaggaagaggaagaggggaaggaggaagaggaggaggggaaggaggggaagaaggaaacagaggggaaggaggaagaggaggaggggaaagcaaagcaaagctttaggtaaattccacttaatagtgtatatctgagccaaaacaaaacaacaacaacaacaaacctaaccaggcagtcctcccaactagaatgagttgaaggaacactaacctggttagacaacattttatggtcagagtcaggaagtggggtacacaacagtttgactggttacagctcaatgccccccatttgagtatggcctactccattggccacctgtgttctactgaagctcagctactgttgaatggctgagactcgctacttgttacaaacgtgtgttcctgagccgagaagaagctcagccatagagccctgctctatgagtatacgtgtgagtgtgtgtacatgagtgtgcgtctgtgtacgggggtgtgtaagtgtgtgcgcacatgtatgctcgagagagtgtgttagtactcacatgtggaggccagatgtcaacctcaagtgttccttaagaactgtccacttttgaggcagggtctttcactggaacatggggctcagcaatttatctagactggctggccaccgagccccagggagcttcctgtttccgcccctctagcgctgggattacaagctgtgatgctacaatattacatggtcctagagatggaattctggtcttcgagtttgctaggcaagcacttcaccatctgatccaaggccctgatttcaaacccaagcaccaacaaacgcttttaatatgtgcttctcaattagactttcagttagaatacctgctaagtgagtgaggcttgtgttcacagactcaccagggaggaaggcatcatcaccagtgtcccaagcatttaaaaggaacctgaaggaaagacttgtactcatcaaaatactgaaataaatgcaaaactggtttttcaagggcagggagaggggctgttagtgtccactggacaaggtcattagcatatctagaggacagggttgctttatatggttctacactgtggtaaatagtggcttgttttcctttctgacctggtgtcacagaatagtcaaggctggcgctatgttctttgcattctggatctttatttacatcttgtatctgtcattattttacttatgcaacaaatatgcactttttagggaatacaagttcagcatcttcctttcttcacgcttttcttctgctaagactgtgtgttcactttgtaccctggcttggcagttcggctctctgaagcgtttgtgatccaatgcttctgttttcttgttctgttgacgctcactcatggtgctttggttccttcggatgcttttatttatttcctaactgtgtgcttatgtcataggaagccacatggaatcccagaattaacagaagggttgctttaaactaaagaaatgtgcgagccaacagatgcaaaccctcctggtcctcctttatcttactgagaacactgagacctgggaagcaagctacaaaggtcctctttcagtcacaccctcctgaaagggagactcaaatctgtgacagatccctttctaggcctgaagggaccatggaagttatcagtagctaaagggaattgctagcatccacattactaacaaaacagagcctggaggccacgaaagagagcaaggaagcagagtgggctaggtggcttacatgaagcattgacctaacagcagctgtctctaagagccatctagctcaccacaggcccctgtaacactggcctttgcttcagaagagctgacatgggctcttgcctgtcgaagcctccttggatggaccgtgatccagcacagagcgtcttgtagtcctccacggctttcccaccaacttggcttagcagagctgtctctctgatgttcagtctgggataaacaccatcgcatagacttcttcccagacaatccatttgtccttctgagcagtcgttcgttttctgtcaatgcctttctgcccctgctctttacctactggagttataagccccagagtctaaccacttcttttgagctttccccgtgtgtgcgggttgtgcctggagataaacgctgttctccactgtaacctgtcttttctgggttagtttgcagcctccagttcctccctttactgtcttagtaactgttcttctgctgtgatgaaacaccatgaccaaggcagtttatagaaggaagcatttaattgcttgcttgcttacagtttcagatggacagtcacaatcatcatgatgggagcttggtggcaggcatgaaggaatggcactggagccatcgctgagagctcacttcagatccccgaaggttcccagcagagagagagagagagagagagagagagagagagagagagagagagagactgggcctgttgcagggttttgaaacctcaaagcctgtccccagtgacacatctcctctaacaaggcctcatctcctagtccttcccaaacagttctgttaactggggccaagcattcaagcatatgaacctatgggggccattctcattcaaaccaccaatgtatatatgtgtatttgtgtattttgttgttgttgttgttagtttttatgtgcatgtgtagagacagtaaccagagaaggctgcctcatcctgggtctctttcccagaatccccaccaaccctcatgctttcccatgtttcactagtcagagctgtgtgagctcctctttccaaaggcagcgcttggtggagaggggatatcatcactgactttgtcgatgcctgtggagtcctgggtcaacctccttttccaagcctgtagagggagggacagatcaacagaattgggattctattggcaaggaagaagggagaaatagaagctgaggaggccatcagctgttcacaacagtctgcaaatgtccacatcaagaggactagcaggcctgtcactggttttctctactgtactggagcctgcacacactgatgtaaggacaccatcttaatgtgtctctttcctgaaagattaagtgacccaaggggactgatgaagccttttaattttcttttattatgagattaatataattatgtcatctctccctgcccttccaaaccctcccacataaccctccttgctcttatcagttgttgctaggcacatatatgtgtacacatatgtatccctaaatacacaagtacaacctactcagtccatgtactgttacttgtacatatgttttcagggctgaccacttggtactggatattgaattggtggcttctctctggggaagacttatttctcctgctctcggctttccttagttacctgtaaagttctttgtgtgagattgaggccctgtgaaggttctcccatctctttgttgttgctcttgttatccttgttcagctcacatttagacagcaggcatgttgctgacactttatgggtgtcactcctgacatgactacatggcacactctcagcaaactccttcattctttggatcctgcaatctttctaccccctcgtccacaaagatctctgagcctcatgtgtgctagttgtcttgtagatgtatctattgggactgggctccatgacactgcattctgattggttgtggctttctgtaatggattccatctgttgtgaaaagacatttccttgaagagtgaggactacactcagctgtgggtagaaggatgaatgtttagaatgtagctgcggattatgccggtctagtaaagtgctgattggaggttctcttccaaggtccatgacttgaccagccctgggtgactgtcttcctagatcagggcatgattgttgagtgtgcctcaagtccattagagaaatgctgggtaccaccaaggtgggtgtgccttcgatgcacccttaaagctatcgtgccatgcaggtcattgtggttcataggtgtcattgctgggtaggacagctggttgcttctcttctttggaagcttgcctggtgcctcctgctaccatgaaaaatagttctcagaaaggaggctttcaggtcagttccagctcaggggcctcctagtcctgtatctgaagtgcatggggcccccagcaatagggacttaccttccacctctgggatggggtcagtagcaataacctgtaatgtttcagaattctcttggacaaccctgacagcaactcaaaagagggctcttatgcctggtttaaggtttttgttagatggtccttggctcttggagggagcattgtcagcccagaagagaaaatttaatttaaactgtatgtgtatattaatacacagacatatgtgtattttttaaggtagttagctaatagtatggtcccttatgccttttcagacatcctactgttgtttactctcgtcggtccttctgtctttgtctcctttcctcctccctttcccagtgatgggaaatgggaagtgatagagacttttttgaaagccttctaattgacagtgtccaggagagaagacagagtgcattgccaagtgagtgtttggtgactggctggttgtgcctcttgattaaggccccatgtttccggtctctgttgtgggtggggcttctgagagctgcacagccttttgttccacagctccactgagactgtttgtgtgtatgtgtgtgtgttgattcccacccctttcctttccagtgaaatgtaataagtatgaaagtaaaacaaaagacagacagacacagagcagactcgggaattagaaaaacacgatttgacaaaagcatgagaacagacaggcaaaagaacagacacactttgtccccggcactctacagagtcaccactgcttttaaatataaagatttatttatgtccagttgtcctctaaggtcccttcagacctaaaaatctaaagctccaatctctcttgagataaacatcgagtcctctcttctagacccatacagaagttcagcacacattgtatagataggaagcaggaaggaaaaattctctccctaagcccatttctcctgttagtaattttttggggaaatattaacagaaaacaatataggggaccatataaccaacacctatcactgccattccttatcagagaactgtagttttacacacttgtctcggggatgttcctacagtaaagaaataaaacctggcagacaaaggtcaagttctcttagtctatgtcccagctctgttttcctccaggttaaatccatcatgagcaaactgctcccaaatccaccagagcgtcttgtccctggcccctttctgttactctccaggctttgtggctaccatcaggtgagctgttctgctcttccaacactgtcttagatgacaagggcattccgccgaagggattaagtcaataaattttgagatggggaggtcatcctgggtggacgggtgtcttagttagagggtcctaattaggatcagagtccaaggagacatggtgatgttgcaggaggttggtgacgatgaagagtagcccgtgtgacagggctgtcgccatcgctttctgttgctataactgggtaatctataaagagcagaaatctatttttgtagttctgggggttgggacgtcccaagcctggggtgagcatctggcaaggggtttcttgctgtatcatcaccacagtggagaatgtcacatgagaggaagagcatgttgagaacatggctgattgaaaggaagctctcataagaattaacccactcccaaggcaactgcatcaacctattcacaagggcagagttctcataacccaatcacctctcagaagtctacctttttggggctgggattaagttcctagtacaaagtttccaggagacattcaaaccatagcttagtcaagagccaagaaatacaggctgcctcttgaatgtaggaaaggcaagggtcctgtcctagggctgcctacccatgacccattcacagacttttgccctcaagaattgagatcacaatgatgtgttgtttcaagctattgtgtgagtactaatttgttattgcagagacaggaagccaacagccattgggtgaatttctactggcccactgcattgtggtggtgatggttgtttagtttttgagatagggtctccctatgtagcctggctagccttgaactccaaatcccctttcttcaaattcctgcaaagcagggattatggtccacgttttatatttgaattagagagtcatagagacaatggctttttttattgtctggttgattcatggctcagtggctccattgtcccagagctgtgatgaagaagaacttaggcaggtgtatgctatagcagggctgctcacctgctgctggccagaagcagggagagtgacaggaagggccaaggacaagacatcctccaaaggcacaccctttgtgacctactttctccaggttctctctgcctcctaaagtttccactagctcccaaaatagcactgtcagctgagagccaagctttcaacacacatgcctaccaggcacactcatattcaagttctaacacttgtatgtatttctgtatacatatacctacacatagcacacaaagaccactagagtgtctagaactttcagatgagagaaaatttgctccatcttccagattgtagaatcaatttcaaaacactcagcaggtgtacacatgacagagctaaccaggagagtgacaggatacaggtgacacagaggaagaaagcttttttgctgaccttggttcctcgatatttgctttttctacaggcatgtattaccgtacttaaaaaaaaaatttctaccctggcatttttgcccactaaagattgaaagcagtcttcaagctaaatacaagtgaggttttatttgtctcacacagtattttaaaaacatggaaacactcagtgatattagataattaggatctataatccagaattaaaacttctcttaaaaaatgaaaaagttgacaatatttcacctgcattttcatgtgctaacaccactgagcaaaggtgggttgtttcttgtttgttttgtttctttgttttaagttttgtgtgtgagactgttttgtctgcacgtatgtctgtgtaccaggtacatgccctgggcccacagaggccagaagagggcgttggatcccctgggactggagttacagctggttgtgagccactatgtgggtatggggaattgaagtctggtcctctggaagaacagccagtattgtcagctgctgagccatgtttccagcccaggggctgttatctttaagcagaacaagtgtttgcatgttctgtcagtcttattgtttacttttcttattgctgtgaccaggtaccttcaaaaatgcaactgaagaaatgggcatgatgatacacgcccataactctcacattcaggagggtgtagcatgggaatcaatcaagatcattctcaattatgtagcaagtttgaggccagtgtggtctacatgagaccctgtcttaaaacaaacaaacagaaaacaaacaaaaagggaccaagagaggaaggattcatgggctcatggtttgagggccaacattctttcatggtgagcaaggcatgaacccttacagttgagacagaaggaacatgaggcagctagtgacattgggctgatggtccattagcaaagaacagagggagccaggcttggtatataatcctcaaggcctgtccttctgggacccacttcctccagtgaggccccgtcttctaaaggttctacaaccttcccaaacagcgccatcaactggagaccaagtgttcaaacagacgagcctgtggaggatattccacacccaaacctaatggtcgcagcttctctactggtttacacttagtctgtctcctgtagcttttgagtttttcattccagcaagagctgccaaataaacaataattcttacatctaaattttaatttcaggtagcaaaaattctaggtgtaaatatatcccaagtatttctgtttagtctatatttttatctaatgttaaatctgaaagttctaaatttattttcttttttatttacaagtgttttgcctgtatgtatgcatgtgtaccacatatgtgtatacctcttgaggtcagaagaggcattggactccccagagctgtagctacagctttatttgtacaagcaagatatcaccacacacatccacctgaagatcagaggatggagcttgctactagctaaccatagaggtctggaggtctgtacagatggacaggaagtgagatggctggttggaaacaggaagtgagctggaggggcagagacaggaagtgagatggctaggcagagagaggatataagcaggaagaaacaggaacttgcgctctttttcctctgggaagctaatgagatgaaagtggctgtggcttgctgctccttctctctgatctctcagcattttcctctgtatctgactccaagtttttattatttaaaccaattaagaactctatttacagttgtgagccattgtggaggtgctaggaatcaaacccaggccctctcaaatacgcaagtgctgttagccactgagccatctctccagtctctaaatctagaaattctaactcgaggtccagcttttacagccgggcctcccccaccccagctccatcccccattgctctctccctcaggctctatgctctgtcagccaaattcctgcagactgtgtttacatacttcctgtctgggaagttcagcccctgctcttcttcagccacccaacattacattgtcttccctggaaaacaaactgaagttctgggctctaaggaaagattctccgctttgacctggccacactccctactccccctgctctgtggagagcatttatttcaccttcagtactttgtttctttttgaaaaaaatttaaagatttgtttcactttcagatttgttttaaattattccatgtgtaggtgtttttacctgcatacatatctgtgtaccacttgtacacaacacctctaggaggccagaagacattggatctctggaactggagtaacagacagctgggagccacaattcaggtgctggcaattgaacctggatcctctggaagagcagccagtgcacgtaaccactgagccatctctccagccattatcttattttaaactgtatgtgtggatgtgtgtttgtgtatgtctgcaaatgttcgagcacatgaatgcagatgcatacagaggccacaggtattggatccactgaagttagtcagttgtgagccatgtgatgtgggtgttgggaattgaactcaggtcctctgcaagctcagcaagtgcttttaaccaccgagccgcctctcaaccccaaatgtatcactctgaagtatagcgctgccatttttctatagggctcctccagctggcttacaatcatggcctcacagtcactgccacgtgcctcacctgtttgtatgtgggaggcataagagtccccgatgccagggtggtgtctcagttcacttttcatccccaaacttgttaattcaaatagctacagaggctggggagacggaccccatcaggggcacttgctgctctttcagacgatactgttcccagcaccaggtgctgggaggttcatggtaacgtccaacactctcttctggccccaaacatgcatagacacatgcccagacagacagatggacacaaatcagaaacaaaatatatcataaagacaagcactcatatacataaatcagaaacaaaatctttgaaaattaaaaataaaatagctaattaacggagctcaggttgcgataacaaaatgccattatctggtgtttctagattgagaggcccagggctgacatggtgtcagctttagggcttggtgtgggctctctctttcatagatgtgtgccctctcctgctagaagggaagaataaaacttgcttacgcctgttttataaggatgcccctcccaggagagtctactcccataactccatccaatccaattaagtcccaaccagctcacctcttagctccaccatgagaggagggatttcaagacacagattggagaagggaaaggggggacacagccatggatgattgtcagccaccatgtggaggctgggaactgaacctgggtcctctgtaagaaccctcagtgctcttaacctctgagtcatctctgcagctcatggattctctttttaagccacacgctcgctattgacaacctgcctcccccacagcccttatctcatcctcacaattccagggagctacagattaagatgaaaccaacatgtggagggggtggtgtgagcatctgagcctcagaatctacaaagagagccctagtcagccctgggagacatagattacaacaagagacttagggactggggttgacccacacactctcttaactcctaagaatgccaagaatttaccaagattatgaaaggtggattcctgtgggcaagagagggagagctagaaagagacaagtcttaacgaaaaacacaggagctcaggcaacaccagctacctaatgacagctcagtgtaaaattaaaagcccaaagctcctgctcaaaaatgattagaaatttcaagacaacaaccacagaacatggggccctgaggagcacagaggccaatgcaccacacacacacacacacacacacacacacacacacacacacacacacacacacacacaagcctgttactatacataggcggccaagccaggaggccctaggcaaatgtaaccctacaaggggttacttctaccaacacctgtttcatttacattttagagatataaaaaggagggaatccttcccatacctgggatgggaagctatgactacctcatgcttgccaggacactcagcagtggtgaatggcattcaggaagcacaagagttaaccaggcaggcgccaaaaagagatggtattacatcaccaggtcttctgagaaacgtcttaattcctttgtgagggctccagccacatgatccagacaccaagtaatgggccctggctctcaatgttgcaactctaaggacttcttggggaacgtactcctgagagctgacagggcagtgcctgtgtgtccaagatcgctcttcctgggagagcctgtccctccagcagcttatacagagctccttttggtgtgtggttgagctcctccctgggcaggcacgttgtgtggacagagcctacacctgctggttggtgcacctttccgtgctcactgtgctcacacaacacctgtaatgacaaacttgcccacgtctaggccaggccctgggtccaagtctatagccaaggtaaattctcagttcctcagtatggtttgactttaggtcccaattccaggttcccagggtgctttgtatattctgctaggaccaagcctcagcctcttccaaaaatcagacatttcacctcctatcacccgacccaggcatcaacaacctgatcaccagtgcttgctgctggaaccccaaaatgctgtaagctgtgtgagcatctcgaggtgggtttgggtgaccttagcaatggctctgtcacgttgggctccctaggtcacctactcatccatctctccagtaaccagtcccaggccttgcttttctgtcctcaggactcgcccatttctcaatgctctgacaaggcatggatttagattcccagctgactgacactcagcaaggattaaggatgtggctgccaagcccttgagagccttcatgtcagaatgagggtgaatcctgctataacaataagtctttctgctgcagccacccaagccctgcttccatgtgggtgctttccactaggctgcccgagttccacctcccgccacattaaggtcccaagtaacacagagagacttgtattaggtacaaatgctgcttggccaatgactaggattcttatctgctagctcagtcttaattatcataaatctatatattttataaggcttatcttattaaggatgccttccgctggcaccctctcttgctagcagatcacatggtgactccagagcagagaccaggaggaagagcaaaagaaaaggaacgacttccttcttgtccttgcttatatatgagtctgcctgctatgtcacttcctgcctggattgcaagacttctttactacatttcccagaatcctccttgactcctagtcccgcctaacctgcttcttcattggccaatagtactttattcaacaaccaataagataaacatatacagaaagacatttcccatcatcctgcctctttcctactgggagcaaagctctcggcctcctcccaaggtctttaagggatagtttgtgagaggatggtcttggaccaggcatgaggagagttgatagtgggagtcaccacgttccattctacctgagagctggggaccctgcctggcaaacagccttcataactaatgacctccagaaaaatagctactttacacagctgaggataaggggacagaaggccaagaaagagggtttttttgttttgttttgtttttatgtatctttctccactcccaagtctgcattttagaattcctgaaaccctgatggggatggagtgtggggggtagggggtgaatctccaatgccatgttgaaagatccaatgtagataatgtttccctttagggccaccaggtcacagcaggttagagccacaggcctcagtggtgagtgtcactgtgtcttggtctttttcctgttgctatgacaagatacccgaaagaagccgctgtttaagtttattgaaccagcagtttgttctggctcacagtttcggggtgctgtctattggggtagggatatcaacacagcagcaggctggctttctccacttaagacatcccaggatgccccgcccagggagtggtcttcccacatcggtaaactaaagacagtcctccacaggcatgttcagaggcccatctccttggagattctctcaggttgacaattaacactaacctcacacacccatggcaaagaatcaggctccacagggctcccctgagggcctggatggactgcgatgaggaagctggggttgcctctgaccccttcagtccttccaggggagaacggagcctgacctgtgaggagaccaagcagaagaatgggcaatgagggaagtggccagggcaccatgtcagggtctttcaatccacaggcgttatgtccctgcttctcccagatgtaccaggtccatcttctatagactccaggcctctgagtggggtataaatggagtaactctttaggcttacattttttcccctgtaaactaagaaagtttaaagcaaataaggttgatatattaattattttggcatcaataactaattaatgactaattaattagtcaacatctccaagccaccaaaggctaatgaaaggcagcttaaaaggtattgccttcagcgagacaaaaattttaaacccaggcctggcggtgatggtgcacgcctttgatcccagcactcaggaggcagaggcaggtgggtctctgtgagttcgagaccaacctggtctacaagagctagttccaggacagcctccaaagccacagagaaaccctgtctcaaaaaacataaaccaaaacaaagcaaaaacaaaaacaaaaaaatttaaaccctaggaaaaaatgtttttttaatctagtgagacagaagtttcatgagtaacttgattccagagcagtagaatgtgtgtctggcctttctgactgttgaattcagcctacaaagcacctactgggtgctaggcagtatgtgaagaatggagaccagatgagcatgccacgtcacggtagttagacagcagacacagacagatgagggccctctggaaaatgtggcccctctgtgtatggctgggcagggtagggcagggcagcaagtaggggtatggtgagggtgtggggaggtggcacactctggatgcactgcactgaagacacactgtctgcatctatctatccctgtttcactattctaacaggataaggtccatgttggagggctggagggcaagtcaggacctcgaagggaaaggccatttccatccgcagtcagggcgctgagaggagaagttatggggcccagtgttccctttctctccaggcccggaccctgcttccccacactcgggtagatctccctttctcagtgaagcctctctgaagatgagaatcccttcatagacacacccagaggtaggttcccatggagatcctaaatccagccaaggaacagtgaagatgagcaaccaccaacacctactgaagggcccaccaccagaggccaagctcgggcgaggagagctcagggaggtctggggacagggacaaggggggcccatgggagtgacagcagataggtgttggccaagtggggaggacgtggatcagctgggccctggggaccgtacccagtgtgcatttcatctcgtcctgctgagaggaagccagaattagcgtaggcaagagaggagcggggcatgctggccttccagagattggccactgggagaaaggggccagcggggagggggtgggttagttaggcgaggatggtgggttagttaggcgaggatggtgggttagttaggcgaggatgatgggttagttaggccaggatgatgggttataaaaggatggtgggttagttaggcgaggatggtgggttagttaggcgaggatggtgggttagttaggtgaggatggtgggttagttaggtgaggatgatgggttagttaggcgaggatggtgggttagttaggtgaggatgatgggttagttaggtgaggatggtgggttagttaggcgaggatggtgggttagttaggtgaggatgatgggttagttaggtgaggatggtgggttagttaggcgaggatggtgggttagttaggtgaggatggtgggttagttaggtgaggatggtgggttagttaggcgaggatggtgggttagttaggtgaggatggtaggttagttaggtgaggatggtgggttagttaggtgaggatgatgggttagttaggtgaggatggtgggttagttaggcgaggatggtgggttagttaggtgaggatggtgggttagttaggtgaggatggtaggttagttaggtgaggatggtgggttagttaggcgaggatggtgggttagttaggtgaggatgatgggttagttaggtgaggatggtgggttagttaggcgaggatggtgggttagttaggtgaggatggtgggttagttaggtgaggatggtaggttagttaggtgaggatggtaggttagttaggtgaggatggtgggttagttaggcgaggatggtaggttagttaggtgaggatggtaggttagttaggtgaggatggtgggttagttaggtgaggatggtgggttagttaggcgaggatggtaggttagttaggtgaggatggtaggttagttaggtgaggatggtgggttagttaggtgaggatggtaggttagttaggtgaggatggtgggttagttaggtgaggatggtaggttagttaggtgaggatggtgggttagttaggtgaggatggtgggttagttaggcgaggatggtgggttagttaggtgaggatggtgggttagttaggtgaggatggtaggttagttaggtgaggatggtgggttagttaggtgaggatggtaggttagttaggtgaggatggtgggttagttaggcgaggatggtgggttagttaggtgaggatggtgggttagttaggtgaggatggtgggttagttaggcgaggatggtaggctacttgagttagctgaggaaggatgggttagttgaggacaagggacagcagagacttttaaacatggacatgttagcagcagctcctgtcaaagctgtgtagtaacaagcaagattgaaggagggagcatcgtttggggctggggagacctttatgagggatgtcccctgaagccattgtttaacacacactccccccaccctgctccccaccatcagcacttctgttttaggactgataaaatggctggatttctgtaactcagagcttgagcgacgtttccttttgtctctgtcaggatggaatccacataggcggcatcatcagtgactttgacttttgtctggttttcttttggattttgagacagggtgtatctacgtggccctcgggcaggttctgcctctgcctccccaatcctggaatcgcaaacagctcgatttttcatattctgatgttagcttccaaggagcccccttaggctgcagcaatgggggaagtctgtaattgtagcaatccagtgagttttctggaaatatttgagatctggcagtgtgagtgtttgctcaaaggaacaagcatccagttctgcatggggggggggtcctcagctggctgcacgagtgcccaggacctttcttacctggtcagccacccccaagggtctgtgagagaacactgtcctcacaggacgagctgactgtcagaaatggctactgagcggtgacttctgctctaatgcccagtccccgggagacgtgccgggaacgctcacatctttttgacttacacaatttcttcggttcttatgtacaaagcgaagcacagcttgaccctgggtgactgcacgatgagcctcccagccagccagggcttgagctttgtcctatgggttggttagtcaagaggccacagccgaggccaactaaggtcatggtcttgggtgaaattcctataaaggccaactggctagtcacagcctgccctctgctctctctactcaggtagtaaagtggaccaggagagaaggtatgcgtaactagcttatcacagcccagcccactgtcttaaattgcacttgtgtgtcctgaatggtgggtcagtaaagggacctcagacacaaagaggccttggttaaacaacagtttgaatgaggcaacacagaaaagaaaagagaagagaagagaagagaagttctggtgacatggaagaggggtaaggggtgaagatgaccaagtgtgtatactatcacatatatgggaatgtcacaatgaaaacattagtatgtataaataatatatgctaataaaacacacggggagctggaaaggtggctcagcggttaagagcacttgctgctcttgcagaggacctgggtttggttcccagcacccacatggtagttcacaactgtctgtaactccagttccatgggacccaatgtttgcttcaagccttttcaggtaccaggtatgcatgtggtacacagaacatacatgtaggcaaacactcatacatataaaaatagctgggagatggtggtgcatatctttaatccccgcacttgagaggtagttccaggacaggctccaaagctacagagaaaccctgtcttgaaaaacaaaaaaaaaaacccaaaaattaaattaaattaaaaataattacataagtaagtaaataagtcttttaaaagttaaaaagatacttaaaaaaaaaaaagtcccagtgctcaggaagcagagacagtaggatttctgtgagttcaaggcagcctggtccacatagtagactccaggtcaggtggggacaaatagagagaccttatcttaaaaacaaacaaacaaaagaaaattatgggacatggaagggaaaggattccctcatccagaaactcatcagctgagaagccagaatatccgcacaggtatggagatttgctatgaaggtgacagacagcatagcaatggtgtccttccatacatagattgtctttgtgacaataacaatgaatgaatattcagtaaggccccactgctttctcagatgtgtgctgggaatttcacacaggattaacgacttcatttacagtggagacagcctaccctatccactttgtctcacctggtggagacagcctaccctatccactttgtctcacctggtggcctcagggtgcaccctgtgtctcatttaggcttcttagcaacccttttaaggtaacagtggagtgtgactctctcagagctctcaggggcaccctagcctctcctcagatgcagtcttcctcataagcatgtgcttgcagtctgcaccattttaacaaactcacaactctttgtcacactggcccaccctgaaattcttttcagcactgaaactaaggatccagttttacctgagacaagtttcctaaagagaactgctcaggccactgctggtgacagcatggaaccatctctctgtgcctgctacctctagtaggaagaaacacggagaacacctttcagctgtgacttacggtgtggatgcaaccctcctgctaacagaaaagccattctgtctcctgctgagctcagaaaacagctcaatttgcctctgagcagcataggtccacagggccaacccccttcccttcctcaagtactcttcccacactctttccctcactcacccaaggcccttcctttcctggaagccgccaggggtttcccccctgcctcagcagaaaggctttggtgatagttgcttatactcacagattgccctttaccacaatggactctgtcataaggatttaagtggacattaactttcaaggtttttctgagccacagagggtggcagttaatagcaggtaatgcagagccagctcagagcctgactgggtcaggccctgctagctctcagtgtgtgacttgggatgaacttcttcaccttaccaggcttctgtttctgttttgtagaggaaagcccatattcatggctgtgttgccatggggactgaaggagaaaatgaatatttgctttcagcatcatcaggcctatgacaagtgttatccacaatcacttttctgcccatggacaaatagaaggcttttgatcattaatggactttgtataacagcttgcaaatagagagaatggttcattttggttttgtctaggtttttctttttttctttttttggttattgttgttttgtctgttgggacagagtcttgctatgtagctcaggctgtccaggaattagagttcctcccaaactctgagattacagatgtgggctactgtgtccagaaaattttctcatgaaaaatttcagatgtgaaaaaaaaaagaactgtataaatgacattcttacaccttgctcagatggtatgattgcttgcattttatcataaacatctattttctaaactatttcagtgtaagaaatcaattaagacacatgaccatgctagactcgaactcagggatctgctttcctctgcctcccaagtgctgggattgaaggtgtgcaccaccaccacccagtgagggacacacctctaattccagcactctagaggcagaggcagatggatgtctgtgagtttgaggccagcctggtctacataatgagttccaggacatccagggctgcacagagagaacctgtcctggggcggggatggggagtgattaagacagtggctgtaggtcttgtcaagctgacagttgaggtaaactgtagatatcttcttcccatacaatctccttcctgcttccctgctggagttctacctgggctccctcaaactctgctaactgtaacactctagcgctgtctctgagacaagatggacatctgtctttgtccacagaggaaccaggactacattgtctcttcctctagtcacactccagtcaccctaacagttgactcccacgtgattctacacacagccatggaattcctgagcacagagtgaatcaagagagataaacacgcttttgagaggattggccatctgaagtgggtgtgctccactggggagagaggactctcaccagcagacctcagagccttgggcactgccctccaaacacaaccaacattgcttcaaccttcaggccagaatcgaacgatgagctcagaactagagaagctagctgagtgtgctggttctcacacctgtcaccccagcattcaggaagctgaggcaggaggatcatgggtttgaggttagtctgcattacaaaaaagaacctttctcaaaagaaaaagaaattgaaacactagcgggaatgcatgcacatagccctgggttatctgcttggcgggctggctttaattctcatttctggctaacctggccgctgtttcctgtcacctctccttgcccagatgttggcttctagtcaagatacacacagccatttaattattaatctgggtgaaacattgctagggagcttcactgtggagtttgtatgcatgtgttcaccacagatacttgcttgacgtctggctttcttgttcccctgtgggtttttcttggctccggtctctttccattggtggaggagaccataaagtaccatcgccagggaattaattgctaagaaccttttggttctcttccttgaaggtgtgtggaaaattttggctgctgtggagagcttgtgttcacaagaagtgagtgaccttggcagtggagtagagtgtgtctctgtgaccaagaaaaaaagtccaatgtttgtgtttggtgacagttttacgccttgctgtcaggagacacatcgacaagcttgccgacagcccaggctcccaaagccatcacggtggcttagccaatgattttcatgagtccatataaatgcattctatttttatattaataccagggagaggaagctgaaagatcaaacaccgaggagaatgggtttgagagtcactgctcacactgctcacactgctcacactgctcagggcccctgggaggactcagaaccagagtcagcatgctttctagccttttccccagcgttctcattcctcaccgtgtgtgtgtgtgtgtgtgtgtgtgtgtgtgtgtgtgtgtgtgtgtgagagagagagagagagagagagagagagagagagagagagagagagagagaatttgattgttttgttatatagcccaggctagctttgaactcctaatatttctgcctcagcctccggggtcctgggattattagcatgcaccatcatgcttggattttttttccttctttcttccttccctcttacccttcctttctcttttaatatgcctgttatatcttgggcacagtgttaaggatacagaaattaataacatatccccagtcctcttgggactcagtgaaatctgagtgtaggaagagaaggaaggagaaaaggagagagagagagagagagagagagagagagagagagagagagagagcacatttaatacatggaatggtttcctggtttttcttggcttggtagagagcagggaagcttcctgtaagagataattgagtgaatgactgaaagagagctgggcccaaggccttcttttaccaaccgagtaagaagctcacgtgtttaagaacatcagatgaaggaatgaggtggagggctttggggatatgggcctttcttagatgggagatgtattggtcagggttctctggagtaacagaactcacgggatgaatctctatatatacagaatgactggcaggctatggttcagctaatccaacaatagctgcctatgagcagaaggtccaagaatccagtgtttgttcagtccacaaggctgggtgtcccagctggtcttcagtatatgccagaatcctgaggaagtaccctggaatgccagtaaaggattggacttgctactgagggtgagagcaagcaggcaaagaacaaaagctcccttcttccacgtccttatgtaggcttccaggagaaggtgtggcccagattaaaggttgatctgcccacctcaaagatccagattagaagtagtcttcctatttcaaatatttaataaagaaaaaaatcccttggcagcggtacacacctttagtctcagcacttggaaggtagaggcagataatctctgagttctaggtcagcctggtctacagagcaagttccaggacagctagggctacatagagaaaccctatcttgaaaaaaaaaaaaaaacaacaaaacaatcccaatagtagtaagcttggcaaccaataaaagccatcacagaagacaacagattttgatgtccctggggtggtgaggaccacagaagcagggtagaaataatactaagatggcttggatctgaaatatctgctccttcctttgtggtttcagtacttggtcctggtctggcagttcttgtgggtgaggccttgctggaagaagctgtcaccaagagaggggcctttgaaaaatcacagctgggtccctggcactggccttgttctccctcatggcccatgacaatgtgggcagcagggactgcacactcccactgtcacagaccaagctgcctgtcttgcctttcctaccatgaagcatggaggcctctgaagccaagagccaaagctggtctttccaccccttaagttgttcctgtcatgagttttgtcacagacatgcctttccattctgggaaagtccaggtgactcactcctgggaatctgggcttgtttcaagtggcaagtagttgacagcagaaatgaaagctgaactgagggcctggggctcagatggtcgagtgcttgcctgccctgtacagaggcccgagtttcgtccccaacgctgcctttaccaggtgtgggagcatatgcccataatcccagcatttaggagatagaggcaggaggatcagaagttcaagcttcaaacacctttaatcccagcattccagagacagaagcaggtgggtatctgtgagttcaaagctaacttggtctacaaagcaactttcaggacatccaggttacactaagtaagttcaaggtcatttgtagctgtataacaagtccaaggctagcctgggatacatgagaccctgtctcaaaaagcagtgtagaaaatcagtggaaatgaaggcatgagcaccgtcggagaaccatgaatgatatgtatggtagtcgatgtcactggagtgagggatgcctagaaaattgctaaagcatacttgtgggtgtgtccgtaagaggatttctggagaagaccggcgtgtatgtcagagaactgagtggagaagaattaatctgaacgtgagtggaactacccaacaggctgagacccagctggagtactaaagcacgagacagggaaagcgcacacgctcacacatacgctcacatgcatgcacactctcgagatatcttgagcaggtacagttcttgctgctgctgtagacaagatcccagattcttcagctgagtaacacagtgtatgtgggctcagagttgaagaattggcctatgataagtagacagtgggtaacccccaaagtttgaatgaagatcagtgcttgctaaggtagggtactgaaggctagagggtaaaggaagactcctggcatcctaaaattcaaggcctactttttattgcaggttttatcaggggttcaggactttgggggaagtctttgggtcagtagttaggcaagtcactcagtagttcctatgcggtgttggctacatcctatgatatttcaatgagacttttgttttgagggcctcactgtgcagctttggctagcttggaactcactttgtagaccaggctggcttcaagcttgtagggatccacctgcttctgcatctagagtgctgggattcatgacatgagcccccatgcctggctaagtatggctcctttaatctcaatgtgaggagaaattgttgagagaatctgtactggcgagtttaatgtcagcttgatacaaatgagagccatctgcaaggagggaacctcgattgagaaaatacctccataatatctggctgtagggtattttcttaattagtgattcatgggaaagggcccagcccattctaggtggtgccatccttgagcaggtggtcctggcttctttctataagaaagcaggctgagcaagccatgaggagcaagccagtaagcagcacccctccatggcctctgcatcagttccagcttccaggttccttccctggcttccttcagtgatgaactaagatatgaaagtgtaagccagataaaccctctcctccccaacttgcctttggccatggcgattcaccatagtaaccctgacttagaagcttaacttctgtgtttaggtctctggtagaagatggacacatgtacactagaaggacagaagtatgatggccactaatgctggctgtagcaacagtaaatagctgctgtctgttcagtgtctactgggtgacagagactttcatgtattatttcttcgatatgtgtgttcatgtgtgagtggattcatgtgaaaatgtgtatacataggcttggggaaggcaaaggacaaccccaggtatcattcctgtgaaactggctcctttttgttttggtttgaattttgagaaaggttctctcagtggcctgcaactcaccacataggctagactggctgagtgagtcctccccagtgctgagatcacaagtgtacaccaccacatctgctgctgtttctccttctccttctccttttccttctccttcttcgttttcttcttcttctcctcctcctcttcctcctcctcttcctccctctccctcttctgggttctgaggcttgaactcaggtccttgtgtttccaaggcaactgctttattgatgaactatctctccagccacttcattccacagatgagcaaaccaagcttggaggtgtcttgggcaggaaagcccttaaaagcatgtttaaacccaggttattctaactctggagccccgatcaaaaccgcctccatactaggggttgccagtgtgctactcttggacctgggtggacccagcccatcacaaatggtggcagagaggccctagagaacaatgcatcgcatcaccaccgtcttattgactataaagaagcacaactgaaatacttgcatttgcataaaccttctgtgtagctgtcccctctgcacgggcgtgaccatgccaccttgaatcagagcaaccgagatgagcccatgagaccctggtgagattgggcccattagcatcccctcctggaatctcagtagtgtagctgcccttgggttgttcacaccgtaagtcactcgataaactcagtggttcaccaagttggacctcagcagattctcttcttaagtctcttggtgcctttgtgtattgtgagtagaaacagatatttctttacatctttatatagtaaaagtcatatgacaaatatgcaatctagtgtcctcaaactatattagccaagaacgtaagatctgaagaagggaatacaggctagaaaattgactctctgttactttaatagtcactatggagcagatgtttgtgtgccctaaaatacacaagtttagggccaggtgtggtggtacctgcctgcaatcccagtactgagagatggggcaggaggctcaggagttcaaagtcttactcagatatatagtggagttaaaactatcctgggttttgtgaggccctgtttataaaaaccacacacacacacacacacacacacacacacacacacacacacacaccccacaaattctattcccaaacatgatggcatttaagaacaggctcacatgaaagtctgaggatcaggctgtgcttgcatgagtaggtagaccagagtttgcgttgccactccccatgggtgcacaccgaggacagccccatgaaggcattgctaactacctataatccaattagaaaacctttcaaaagaactggatcttctggcaccttgtctcagcttgctttatgttgctgtgctaaaacattctgaactaaagaagctcaaagagggaagggtttatttggcttctccttccacgtcatagtccatcattgaggcaggaaactggaggcaggaacagaagcagcaggcatgggggacactgctttctgatttcagccaggtccacctgctcacagatggcactgcgcacagtgggccattccacatcaatcactaagaaaatgccctacagacgtgcccataggcagcctgatggaggaattttcaattgaggttcctcttcccagatgactctaaatagtgtcaaattgacaaaactaaccatacaccccttccagaacaaaaccaagtacctgtctttcatgccactgtgtgagagctatacaagtgtacttcagtttccatgacagcaggaccctctacagaaagccaggtggcttcttacaaggggagcttcatcaaacactgtcgggcttgagagttgaatctgagaactttgtcaccaaggagatacttacaccgtagacgaaggcagggcctccgagtgtggcctgtgccgacctctagagcagctgatgaagctgatttggggccacacttcaaacagggagggctcactcttcctctctgcagcaaggcaggctgcctctcaaaacccttctagccaacgagaggggctacttgggaagagaaaggttagtgggaggaggggaaacaggagacgacaaagggggaaggatatggtcattgtgcaggacaggattggaaaagtcattgtgagaccaccattttgtacatgaacatacactaatttttttaacgtaaaaaaaccaaacaagccgggcgttggtggcgcacgcctttaatctcagcactcaggaggcagaggcaggcagatctctgtgagttcaaggccagcctggtctccagagcgagtgccaggataggctccaaagctacacagagaaaccctgtctcaaaaatcaacaacaacaaaacaaacaaacagaatctctcagctgcagaaaaggggatgttttgcttaacttctttctccactttttgaagatcttagtgtgtccaaatcccttttgttttgaggccattgtgtcaagttgtctctgtggggttaacagctcaaagcagaccctcacccatcacaatccttgattatttgaagtctactcaatcagtactatttaaaaaagttactgtatttttgttgtgtgaggacagcttgcaggagctggttctttctaccacatatattgaccccagagattagagtctggttgtcagacttggtgcctttacccactgagctatctgatcaaccttcagagaatttcttttccctttctaagcatgttcctgtagtttttcacctgttttatccagttgggtccagagcaatgcaactatggggggactggagctcaggaattactgtttggatgcccttgggctgttcgccagtggatctcctcacccttccagacactcttggctttctgttccctctgtgaaggaggggcacagcagtggcgacagccctcccccacaaggcctgagtctcttctgaacttagcatcatcaccatgcctgtcagaacacatcactgttgttaccaggtacagtgacctggttggggttttctcttttctccttgactctgtgtagctctcagctgagagtggccaaagcgagacataagctacctcacgtggacaaccaaaggaacggagtagcccactgtgagacgaggagttaagcgtctgtgatgggggccaggctgtttcattcctcttcaaccttgacttctttttgccccagctctttgtgcctttgtgtggtttcaactcagcgtgttttctctctctggaggacttggatgtctaagttctctctgaggagcaacctttgtgagaagctagtttcctgacggcagccttttgtacagctgtccagagagacctagtgaggcaggtgtggctcccagtgacctcctgtggggagggactccaggaggccacaagaagaacctgtgtggtcttcaggttaacagagcgaggcctgctgtgagcctgaccctcttccccagaagaacccactccaccctttcagaaggtgaagcaagcccattggagcagagggagtgactgctggctcatccagtgtgcagtgagctccacagggggcatgtgactcaccagctttcatcatggttctgcccaggattcacaagccttccacaattagcaaccggtgcatacacccacggagtagctagacagttcccattcagaacacacagagaggaggaaggctcaaattgctgtgatggccctggctcctctggctgacctgctccctcatatacagttctcctaaagagagagctcttttctgcttcgccttttagcacccagccactcatccagcaggggcctcttacatgccgtcaccgagctacatcccacgtcccagctaagaactgctgagtatcttccttgggttttacactgttctgggtccctgggggattatcagtaatcgggcagtcttgtggagttcatcatttggtggggaaccttgggtcagtgacctaatcttttacagtgtgatttcctggcctgtggagcggggataataacacacccgactcattaggtaattcactcagagtgctcaccgtggtacccgacacttagtggacacttaattactgtgtgctcttaacttctattaagagatgactggtgtgggattactggtgtcctgaagtgcctgccggtgctgcagcaaaaccttcatccgaggaacccccacagtgccacacctgagcactcggccacagccaggatggaatggaagttgctgaattcagttggtgtttctgccccacgggtcaaacctcgcttgcctaatctgaaagaaagcagggtgaccaaccagggcctgcagaggggggggaaggtcattttagagtgtaatcattttatagccaccattcgtcccctcttatgtggggtaccacccagacagctacatgatggaaagaaagcccagggatgccaaactccttgactagcccatagccagtcaaggagtggtcaggttgcaacctgcaaggcctgtcttcagggcagtcttgcaggcctgtggcttctccagccacaggtccctccctagcctcctccttggtgaggttcctgagatacccctctcccccaggcactgaccatttctgctttttatgagcaaagactccttacaggtatctgttggtacaatctcatggtgttgtcatctgctggcgagttcctgatccaattccaccgtgtcctctggccttctggaaaaagatgggccagagtctctgatgctcccagtgaggtggacaagtcatcccccaccccagtgaggtgggcaagccatcccttccccaggcaggacaaaccttcctcagccaggcagagaagctgatgaatggcaaagggaggtgacagttgctttctacaagtagccttaaaacagacagaggggcagtgagctgtctcagagactcctcccaggtcttgattctgggatcataaccattttttcatttttttttaatttttcacttttgcaatcctgagggttgaatctagcaaatcatacatgcaaggcagacctttatcacagagttggcatgttcccagccctggaattgtaactggtgtcagctgaaatagttctgcccctagcttgagctgggaagaaaaccccagggggagagaaggagaggatgggggagggggacaagacatgagatgagctgttctagaaagtgagcaggggagctttggaaaacgtttgggatattcccattgagcattgtctgcatccaggattgctctccagcaccacaaagttctactctcaagagggttttgaaatttaccaccttctgattgcaataagacccccagtctggctaattgccgcggcctggggtagcaagagggcaggtgatcagagtgggcacccgggcctcctccttttcaatcgagtgccacctccagctggcttgatttgccctttccagactgtgaggtcttgctgtgtccttccctagtcctcaacatatttaacccgatctgcagtctctcatctcccaaacaagaccacaggaagctagtgtgcagagttactatgagaaatgagatacaagagagactctgactcaaaaaagcacccccaaaggtaagaaagaaagaaagaaagaaagaaagaaagaaagaaagaaagaaagccaggtatggtggtgaacacctttaatctcagcgcttggaaaggagaagcagacagatctctgtgaggttagggcagcttgtctccatagtgagttctaggacaaccagggctacacagaaaagctatatatatatatatatatatatatatatatatatatatatcatagaaattagatgtgtacatgtgcccatctcctgcttaacctatgtgcatacctgggaatgcctattaggagctatgaagccttaggcaaattactgtgcctcagtttcctgttctgtaaaatacacagacaaatgtcacctacatcagtgggctctgatgaattgagttaatgcatgttatgatgcgtgtcagtaggtcagtgggtggtttgtactgaaccctggatgttaatacaattagacaacacacccaggagaatgctaaagaaacaaaaccaaccccaaatctctgcccttggcacctggaattccatgtatatgacagaccctgggtgctcccgctctcctgttgtcctggacagctgcctctctccactcttgtgaaggtggcaccttggtgactgctaagccatcaggccagtgttttgtgacacaggaatgacattggaaaggaaagtcagtgcgtgtgacttgggatcatcctaggaaggagacaagtgtcctggaaggggctgtcattcagagtgaacctctgtaactctgccagacagagttaaccactgtgacagctctctgggttatctgtcaggagaccatcttctaacctacactcagaagcaggaaataccaaggtcccctccttgctgctgctatgctcttcagggagaagagcttgggaaggctgccaagggggaggggagctcagcagctggcccagaggctcactgcactggtccaaactggctgtgctggatctgcagggcgaagacactatcacaagtcagcagaatcagtcacagttggagtggcgccctgtgccaggcgcagagggcacaatggcgttaaggcaccacccagaccctcaaggcgttcaccaggctgccagatgaagggtttgccaggacaggtgtcaatgagactctctcagctccaggagaggagaggaggagacaggtggggagagagccttactagtgtcaacattctctctcctatactcccaggggtgtccgggcttctgcttctctgggacacattgtcatctacaaagttcatattcgagacaaagcaatgcagttacaaaaatgtcatttaatattttaagtgattttattattttatattggaccacattcatatctatccagagctaaatgcgtccgggattacaccgctcagtgtgtctaggctacatgtacccagaattgcatacactgtgtgtccaggattgcacaggcactgtgtgtctaggtattctcccaaaggattcctccctattattcacagcgacattttggaacaggtgtccatactctcatttttagaaggggaaacctgacattagaaagtgacgggaacaggtcagggaaacaggacagagccaggcctcctcacaactctctgctccggaaggtcacacactcgcctttcaggctgaatgtctcagagccagggaggtggttctaggaatgatgttggaaaacatctctgtctcagtttcaggacccccctccccctccccggtgagttcatctgagggactttaagccacagtgtgtccctgcacctgctcctgtcttaggtctgggaaatgctgatagtctcaagtgcagtgcagagaaataactgctcagcctgctcttgcgcctgccctgccaccacccaggacaggcgtcccccttcagggctctcggcacttttccagacggccgtctttgaagaagataccaacccatccagtgggagagaagaatcgaatgtttcacagtaacccagaagagcttgcttcatgcatgaatggacagtgagaggcatgccagctctacctctgtgctcgccctgaattgatgctgaccgctcacaagccctgaaaacataccactttgcacaaagcatgtacataagtcttctagtaccaaaagataaatctgtctaactttctagccatagggaattggttcaataaactcaggagctctaaacaccaggtcactatacaccattaaagtcagggctagcaacatgctgcaggggtaaaggtgtttgctgccaaggctgatgacccgaatttgaagtccaggtcccataaggtagaaggagagaacaaactcttacggttgtcatctgaccaccacttgtgtgctgagattcctgtaacggtggatttgcctgtgaacctgtaacagtggccacgcctttttggagcaggaatgccccaacagtcacttactgttttctatgtaagttctttccctaataaaactccactgtcatttatcctgagtctggtgaatccataacttacacaccattgaatattgatgcgtatgtgtaaggaaaaatgtggtctccgtctattttcttttgctataacagaaccccacaggccccataatttataatttatatatattatagttcatcattctggacatccaataacatggtgccaacatctgcttggctataacatgaaagaggctgtcacatggtgagactgagttacaatgctgggttcagtctcttcccctccgtgtaaagccactaattgcattgtgggggccccaccttcatgacttcatctaatcctaattctatctctaaggccccatttccaaatataaccaaaatgacttgtgattaagtttccaacacagaaaattaagagagaaaaattttaaaccataacatgtttatagaaaaaaattaatttatattcattattaatagatactacctctgaccaaaggaataaaagttagttattctctttctggctttttaaacacattttaatgcaattaacctgttttttttttaaagatttattattttaaattctgtgtataggttggtgtgtgtgtgtgtgtgtgtgtgtgtgtgtgtgtgtgtgtgtctgtgtgtgtgtgtctgtgtgtgagaataattgcctgtggaggccagaagtgttgtgtctcctggcactggagtcacagatgctgtgagcagtcccacaaggatgctgggaatggagctgagatcctctatgagagcaactagagctcttgacccagagcaacacccactggaccttgctgtaccttcaaaatctagggatctgttagaaaccttaaaacagaaaaagaatcacatgatctgaaatgctagaaaaccaaatacctttcttactttctttgcctgctttcctgatattttttgatggaaagcaaacactctgagtgggtgatcccaggccactagactgtctatagagtttcggcaggtaagaaccagaggcattttagaagcaatcctagcagatgagataactggatagggctgtcaggggccaggcagagctgtggctggagttcagatgcctagccccaggcatcttgacaccgtttgcttctgttgcacacagaaagggtcagcaccatgccatgtggaggggccaactctgggcagagccttgtgttaaggaaggcccttcactatcccgaggctctgccgagcagcaaacatggggctgaatagctgcagatccaaccatgaaagtaaaaacacagtgaggagtgacgggaagactactgccagcgcttccagatctgctcccaggaaagtttgtcccacttgaagacagaggacagacaggtcccagcttctctgcagccctcttcagctgtttggtcttacatgcgtctcgagaactttccatccttcttccctttctgaaaagcacagaagtgaggctcacccccacgggaactgatgcttgtcggcatttctgcagaatacctagcaatagcgttcgcccttacattggcaaggccttccatggcatcctgtgttagtgagtgtaggccacagcaggaagagtcattagctgagactccaaataagcaaggttggagaaaagagtctggaccccaagaaccgtgagaagcaggcacttccatgtggcctgcttctgtgctgtcatttctgtttttcactcatgctttcatgcaggtaagctgtctccgtttccacagcatagcccctgcagcagtctccatggcagaagactgactcagctggctgtttctcgtgattgcaaggaaagagaaccggtgtgggttggctgtgcccagcatgggtcatgatatttcactggcccatgggaagatggaggctctcagaggcctgagaggtcagctggacaggtggcatgtgcctatcatcctagttactcagaggcagaaggattacaagttcaagcctgggctgcagagtgagttctaggccagtctgtgagatttagggaagatcctgtctcaaaacacaaacttttaaaagggcaatgtataacttagtgattgaatgctggcctcgagtgcaaggtcctaggttcagtacctggtgctgggtggtattgtgtgaaagtaaggttatcccccactccaccccaccccaccccacccccgacatgtgacaatttgatgaaaaaaaaaaaaactgactaattgaataatgagtgagaaaccttaaaaagttaccatgaaaaagcctggccaggtgggccagtaagatggtaaataaaggctcttacagtcgagcctaatgacctgagtccaggacccacttggtggatggagcaaagcgtctcccacaggatgtgtacacatacacacaagggcacacacacaattataaaaaaacaacaaaaaaacaaacaaaaacgcctagccagagactccttcttcattcttaagcagtaatatcacaaatctggggttggattaggggagctgcttggcttggctcctaaagagtccctgggtattttagggcctgagtcctgagtcaagttgaagaacccttcttctctctttgcagccctctctacagagagctaaaccatgggtaaacaatcctataattttaactgtatttataaaccctctatcctttatgtaatgtttttttctgctctgtgcttagtcccaatgttgctattttctcagaggaaatcagaggaaagagacggtaattataggtcaaatgccagctccggaagcaggacaggcagcagaggagccgagtaccccctaccctcttccgggtacaccctggacacccccgctttccctgtgcctgggttagctttccacctccacctccttgtatctctgctgcctgccatttgccagtccagcacgtgacaagacaaaaagggaatgttaagagtaaaacacagtgagttaaaactgcgtgatgcctgggcagacctgcctcttggagacaattcaaatggaaaagaaaagaagaaagggaaaaaaaataaaaaaaaaaacccaaaccacagcatttcaggtcattggcctttttaaatagaccgccggcaatatttactgctcctgaaatagcagtcacgtggaataaaaccgtgttcgtaaagcctgcgaaacaaaaggacaatttacaggctgccatgctcactgagggacctctgcttcctggccgtcccagccaccctctgtccaaggccttcaggagatgaatacaagtcaaggtcaggctgtatggaggagccttctcaccttaagttggaaagacaactgagtgctgagaagctggggatgaagatgatgtggacaatacgtctgtctaccaaagaacagcgcccagggagggaatgctggctgttacagaaaatctgccaggggcatcgtctctctccagccggccgtcttatctcctctttctcctttgcctccatgtcttcacttaccctccttcctcacacagacacagacacacacagacacacagacacacagacacatagacacagacacacacacacacacacagacacagacacagacacacagacacacagacacacagacacacacacacacagacacacacacagacacacacacacacagacacacagacacacacacacagacacacagacacacacacacacagacacacacacacacagagacacacagacacacacacacacacacagacacacacacagacacacacacacacacagacacacagacacacacacacacacagacacacacacagacacacacacacagacacacagacacacacacacacacagacacacacacacacagacacacacacacacagacacacagacagacacacacacacacacagacacacacacacagacacacagacacacacacacacagacacacacacacacacacacagacacacagacacacacacacacacacacacacacacacagacacacacagacacacagacacacagacacacacacacacagacacacacacacacacagacacacacacacacagacacacagacacacagacacacacacacacagacacagacacacagacacacacacagacagacacacacacacagacacacacagacacacagacacacacacagacagacacacacacacacacagacacacacacagacacacagacacacagacacacacacagacacacacacacagacacacagacacacacacacacacacacacacacacacacacagacacacagacacacacagacacacagacacacacacacacagacacacagacacacacagacagacacacacacacacagacacacacacacacacagacacacacacagacacacagacacacacacacacagacacacacacacacagacacacagacacacacagacacacacacacagacacacacacacagacacacacacacacacacacacacacacacacacacagacacacacacacacacacacacagacacacacccccttcttacattctccttctggctactctcctgatctctccacttggccaaggtcttcgtggacctctatcaattagctgttgcttgaaggtcaaacctagtcactaatggtgggttaatgaacgaatggcccaggtctaggtctccatgaactcacactgggacagactttgttaaggatccatgggaaccttttggcccttattctttacacgctcctgcttagttgcccaacacacagttaagaaaaacatcactgacaattagttgtcatgtttataaacactatgtccttctcaaaacctcccatgtccatttatttcatgcttttacaacaccttggaaactgtacaaagcagtggaagaagcagaagaacaaagagacacggtggtaacatggccacatcacagaactatgacaaaggaccaagtgaggctcatttcagacctaggagagggtcctccggcaagttctacaaccctaatccctggcttctcaaacatggggcacttggctgacagtcagctcaccacaaggagtgacatgaagcaaatctccctgggtgtctatgtttccttcctttacatcaaccacactgaggacaaaatgccattttgtatctgttacatttacatcaaatgccaggacgggcggagtgggagggcagggggagacaggacgggtacgactgagtttctttatgacagaaacattctggagcaagatggtagacatggatcacgacctggaggtgatacgtgaaccctagagacgcacactttaaagggtgcattttgtgaggcctgggtatatcgccatctttaaaacaaacgaggggacatcggcgcagtagaggactgagcacctggctggctggggatgccacttgttagtgcactgttggttactggggtcgactctgcccttcacttgctgcaagctctccttctttgatttctggaggtcatggtgactggtttttcttggtcacagtgcactctaaggtggaataggctgattgtgataacacttttgatatgagacccttgaagagcaaagccagctccaaagtctgcaatttcctcctcttctggccgtcaggaacccatgtaatgtcccagcattctgagtgttgagctgtgtcctctcctcccgtcacccagtgcaggagagcagcgtctgtactctctccacaggtctgcatttcataggagtctgttcccagacgtcaatgctgggtgacccctgggcactggcatgaataaaaatgtcacttcctggttccagagttggcactgtacatgcccacctgactattggctttgagccagagatagcctgagggctgagggtttgcattaaactagcatgtttccaatgtccctgagtcacagctggggtttctgcctcctgagggtatctgtgtgtccatgtggtttcctgaggtttgtatagtcagattaggggttggagtgtttgtgtgtatgtgtgtgtgttggcagctggagtggctaaatgtctttaaaatatcaatatttaaagagaaatatcaaagcaatcaagaaaaaagataaataagctaataaaaacaacaccttaccctatcacccaagagaacattttcccatgtcttccctgctcccgccccccccacacacatatacctcaaatattccataagatggctgctttctaagcggtttctaataccaggacattgcgtgcttgctatgtacaggcactgtgctggccccctgacatgagctcatctcgtccaaccttcttgaccgctctgtgatgtgggtattaccacagttctgtagatggagaggctgcagcagagagacagtaaattctgaagctagtgctttacctcggctgcagaggcagggacagggggcagcacagctgagagacaaggtctgcggttcctctcattcactcactcactcactcactcactcattcattcattcgttctccaagtattaccttcgactaggtcctggagttccagtgggaaggagacaccgaccttaagattcagtcttttggggtaagataaaaatataaataaatcatggcacattggagtcattggacagattatcaagatcaccaagagaaggcattactatcaccaaaggggaatgtggaggtgacattttaagtgtatctcaaaaccacacacacacacacacacacacacacacacacacacacacacacacaagcaaaaggagaacatatttgccagagttagctttgggtggggtgggaggaggaggaggccgtaaggccatgcaaggctgagcaaatagcaagtgtacagctccaggctgggagtacaggaagggagaattagacacgagggtgtctaagggggtggaatgcatggagtgtctggaaggacacaggcatggtcatggtggtgtctgccaaactgcctctgtagctggactcctgatcctcctgcctccacctcccaggagctgggatcagattttggaggacagcattcgagaggaagtgcaagagttggtcaggctggagcaggaaaagtggccatgaccaggatacacctcaggggtccatgactttgactgcctagcagaagcatttgagggggccctagccttggggtgttttgatttgtttgatctcagcagtctgtgagaatgtggtctgaaatgttctcaacctagtgtgggacaacccatcagtatctgagtgggttaaggatacaggcttaggtgggagagacagctctgcagttaagagcactggctgctcttccagagtgtgtgagcttgattctcaataaccccgtggcagcatctgtaactccagtcccagggtatctcctgacccctggatcatatggggtacagacatgcatgcaagtaaaacagccatgcatgtagagtaaaatgaaagaaaaaaaaaaagaatacaggttcttagctattactgtcagcaagcaggagcttttgatcaacttagtactcttaatgccctcatctgtacaatgtgaggacaactgcctctttagcttttaattacatcagataagatacatatggcttgaaccctattgctgacgaagcaggcagttcatggtagctctcctctttaccttgaaacgatccaggaaagaggttgtgagaaatggagccaagtcaaaaaacgcaggctggggagagcagagagagactggatgatagaatggaacatccaacgcatggagagacagggcgtggggaacagtgtagacggatgagaagaacgaaagacagcacctctcctgacagcaagaggtgaccagaaagcagaaggccagggtgggcagagcgtgtgatgacatcaatgcagagtcaaacctgtggccgtcaggtgagacctctgctgggggcggcacggtggtcgcgaccagggggaggcctggactcgggtatctgtgtggagccaagaaagtgtgggcgaaagttgaagctacagaactagccaacatcgctaaggacagcgtgtatgtgagtgagaagagatgaggttgaggtggactccaggaagtgctcagatacgagggcagggagaagacaaaggaaaattactccaggaaagaagtaaggggcagaaagcataaaccaacagggaccctcatgaaggaaacaccaaggaacagttagcagttatctactgaagaaagtctgaggtaggaaaaggcttgagagctttgagaaaaataatgattttaaaaggcaaatctctctcggtgttgcctcacacacctttggttccactctggaggcagaggcaggtggatctctgggagtttgaggccagcctggtctacactatgaccaatttagtgaccggccagctacatagaaagatcctgtcataaaacaaaaacacaaagccagtcagttgcttccaggaggcacagagaagacttccacattctcttgtgttgtccacatgccaccaatgttttcttttcatggggggggggctagagcagaggcagtggcagcctcgtgatgaccctgggatggtgggaccagcatcaggcacacagcaaagcagcaaaggtgtgcactttgctgaggctctcaggggccatgtaggagaaggtcctgctgggccttcactcctagcaaacttcctgtgatttgaagaccctggtgggctggccacttcatctattcaaggaaggcattcctctaccccatgttcagctccctgacagccagggggacatgtcctcaaagtcaccaaaaggggtgggtttttcccaatgctcagcaagctctcaggaggggcagccttgggctgtgggtgactgactgtaaattgcatgcctggtgttctctaatcatgagccaggagccagcagcagcagctcgggacctagagatcctagacaataactcgggggctggactctgtggtagtctttttattaattaatttaaataattttgatgatcctaggattgaacctagggcttcaagcttgctaaacaaacagcctactcctgagctgtgtcctccacccctccaatatgttctttttattttggggctcagtgccagctgtcctggaactcagtacatatatggatcaggctagcctcaaacttttgatgaagtagaaggccaccatgaccagctttcaatatgtttgttttcttattttactttatgtgttaacattgtgtgcaagggcgtatgtgtgcacatggcatgacatacatgtacagatcagaggacaactgtatggaaccagttctctccttctacctttaaataggtattagactcaggttgtccaggctgggtggcaagcaattttacccaccgagccatctcagcgtgcctaatcattttttcagtatttatttttaatgtgcatatatgtatacccgagtgtaagtctgcacaccacatgcccgcagaatcccgtggagatcagaagagggtgtcagatcccctggaactggaatcacagatggttggtgcaggcaactgtggtgacacattatttatgatttaataaagcttgcctgagggttcagaatgcaaagatagccacaagccacagagctaggcagtggtggcacatgcctttaatcccagaactcaggacacaggccaaggaatctgtctgagttcaaggccatcctggcctacacaagagtgaagaggaacagggctcacacctttgatctcagcacttgggatcacacgcctttaatcccagcccgaaggaggtataaaaggaagaagcaaagggtctcatgggaggtttagtttccagacagggagtgctattgcctctgaggattcgtggagccaggatcaccctttcagtctgagatggaggtaagagctagtgacttggctgctttgcttatctggcccatcagctagaaccccaatttctatctctgggtttttatttttcgtgttacaggtaactgatcccgggtcctctgcaagagcagcaagctctcttcaaccatgccccagtctgtttttaaaagctctccaggtggtcctgatgtgcgtgcagccaggagaagcactgctctgtacaacggtgagataccatctcctcttttcatttctctctctagaacactgtgcaacaggtgttgttcagcaggtgtgagctgaggacctggtacatggggggcttttcttgtgctcaccacacgcactcaggcatgtgactggctttgtctgagggcttgttctttcgctaggaagcagccattcatatgtagacaaaagttacatcaaaatgcagagactgccaggcagggactttgtgataggtgtgtgcacactggagtggctcaatcatggctcaggagacaactgtggacaggggagaaaggaaaggaatgtggctgaaataaagtggtgggaaatgatggtataaggagtcagtcagggaatccagaatcagggacattagtaggggcactcaccctggtttactctgcattatttactcagaggcacggaaggaaatgaaggaaacgtaaagggacagcctagtgtaaaagaaattaaagagggctggggtatagctcactgcttagcacatgcttagcgtgggtcttgtgctctctctctctgtctctctctctctatccctatcactccctccctccctccctctcccccatcaccgccccccccccaggctctttactatatagtcctggctggcctggagctcactcacccctcagatcagcactcaggaggcagacataggcagagctatatgggtttgaggccagcctggtctacatagcaagttccagaaccagccaggtctacagagtgagaccctgtcttgaggaaaaggaaaacaacgacaacaacaaaaccaagggtaaataaaaaaaagcctagatgctgccaggccctccatccagtctccaacactacagaccaggaaagcagaggcctaggccccagtggtccaggcctgaaggcctgaagcactgtgcttcacagctacttgggaagctgaggcaagagaaccaaaaattcaagaacaccctgatgtatgaagtgaactcaaggctaacttaagcaatttagtaagagcccatctcaaattaaaaactagaataagtgaaaacgaaaaaacaaaaaaaaaggaaggaggagaagaggagggagtggaggaggagggggaggaggagggagaggaggagggggaggaggaggagaggaggaggggaggaggaggagggtaaggtgtggaaacaagacgtaagtatgtggaaacttgctggctactgaaacgggcagatggttggtggtgtaaggctggagttcctgtgacccagcggtttgcttctgttgcctgattttcagtgtgtaaaagggcttaggggagatagggatgagaactagagcccccagagaaagattcatggactccaagctgtgtcttccctctctccctacttcctgcctccgaactgtgcctccctcccctccactccattcccctgccctctgctcccccctccgttcctcctccccctcctctcctcttttccatccttccctcctccctcccctcccccctcccctccctccctccccttccctcagtggctcccttctcctccccatctcctgtgttggagcctctgtaagcccagaaggtaccagacttacaaagcagtcaccaggcagggtggggcagagagtgctgggtgtgagtggccattagaaagtggggacattgcttggggacttctgcagcctgattacagaggaccttggagagtggagaatgccaggccaaggccttgtgctgggactgaaacttctgtctagaggatagtgatgcaatcaggaagctggtgaggtcctgtggtcacggtggccacaggtaggggctgttgtttcctcaggctgagaagtgataggggccacctcagcacgctgtgcctgtgctggtgactcttcatgaagcaggcagaaaaaggagtaatgaacttagcgcctgtaaacctagcatttgggaggccgaggcccaaggattgctgaaagtctgagtccagtctgggctgcacggtgaatgccaggtcccagcctaaagatcaaaaccctgtctgaggaaatacaatgtcacaagtggtgagggagagatatggacaggtgacactgtaaggaggctcggggtcatgtctccatgggtcctgggcttccgaaacaatgctttcctgtggtctttgcctccttctggtgtgccatggagtgagtaattcgtctgacccagcatctgtccactggacaactgcagaggaaggatgaggatgggcttagttctggaggtggggacagctctgtcacccctcccagctgcccgagataacctggaacccttcccttaatgtcctcagtgggcacggatggcctcccagacgatgcaccacacaactgggaaggcggtgtttttctctatgactatttaattatggggctgacaaacaaggggaaaaaaaaaacagtcacatgaggatttcaagcctgagattgcttcagtcgactgtggaagtggcaccggttatgcaacaagatttttagggtgaaaaagtcatgtttgatcttggtctgatggtctggtcatctacaaaacactatccctttggggagtggcaggtgagacaatgacaagctctcccatcccacaaacaaacagaaaagaataaaggcctggtatttggtggcatcttgggaaccacttgttggctgtttctgattcatttcagaaaatgacagcaagaggcaaaagagatagaaggtagatttctttttcaactgacttccttcctgttcaaaaaaaaaaaaaaaaaaaaaaaaaaaaacccaaaaaccttgcaagctcagtccacctcctccctctgtccctccttccctcaccctaccacaaacccacttcctccccagtcctggcccacccactaacactctctttctcccctgtcccttctgctccttcccccacagctgccagctcagggtcatgcccaggcagccagataccagccaagagttttacctcactctcagctctgggcagagctggcagcacagctgggtcaccttgggagaaggcagagtgacgagggcagtagcctgagagtaaagccaatgccagcctggtcttgcttcaaatatgacgtgtcagagccattcctaatcatacatgaagagctgcactgagggctgctagctctcagacgcagcacaaagctcatgctcaggtcttatttaaccctcagggagcacgtgagaggtcacctttccctttagagatgttgcactatctgccctggtggcagtttgtggagcatagactcacatagccctgactccggatcctctgctggccgtcttgtcatttgcttggaaggcctttatttgccgtgacttgtccccacctgctgaagtgggaaagactctccaacaagaagccatttagagggttgccaggagccaggttgagcctgctccagaagccccagggacctataactggtcatcagcaaagtagcctgctctttgtcaaaggagctgctgccaggtctccagggaaccaggcctctgggcccgcgtcctagttggttcagtggtaatagggccaaggtcacaggcacactcctaactttagctagcatttctcaagtgcagtccactgggggtgggtgcaaatgacttagaccaaccctctaatttttcaaataaataagtagcccacaaaaccatctgtcatacagatggatgtcaagggttatagacatatttaaaatagtttctatttgcaataggagagacctaatgtttgagtgaatctcagccccctaaaggccaaattccaaatctattccctttcccctaaaaggcatcctgggagatggtagctgtgaattatcccaagccagtcagggccagagaagggggcagcctccactgtgcacactgcactggggtgggctcggcaaagaaccctgatacttgtaaaattttagccttaatgtgggagacagggcacacaccctcatacacaaaaacagacagagcctggtggtggcgcaggcttttaatcccagtattttttgggaagcagagacaggcagatctctgagttccaggtcagcctggtctgcatagagagttccaggacagctaggactatgcagagaaaccctgtcttgaaaaacaaacaaataaacaaacaaaaatagacacagaaacatgtgtctaaaacacagtacagatgatgacaagggtgcagagatatgaagagagggtctgcgggcgtttaaacaagaaacaagtttctgaaagaggaagtcacaaagctgaagatttgagtctgggtgaagatgagtaagtttgcatgtagacccagcccccagctctacaatgtgtttggagtgccttggaatagcccgggggaagccctggagttcaagccagtgtagtctgtggccaaagctatttgactggagtcattctgtccctcttcctcttgaccatacctgattaattaattcatcaacactgattgagcttcttctacaagagaccggcagtggtaaaggcacctggtgaaatataacactggtttgtagaattaccttcaaagaacttctgctggcccaagcctgctaaggggacagaaaaacaaagagatgcctacagtgtcctgtgataaagactctgacagaaaggtcagaggtcacaggaagtggccaggttcaaaagggtgacaaggatggcggtggcggggcggccacagcggctgagttgttgcaaaagcaaatagacaatggaaggtggaaagagtgggaaaggatgactgggagagacgcctgcacacaggcattaggagagagagcacttggtgggctgtgagggtgtttccctgggtgttgagcagtgaactcggagatactggtgggttcacatttgagtttgaacattaaacttgggatgtgatgagagaggtatcttgaggatgaacagggcttcgttttttaatttttgggggacagtgtctcactcaggggcctagactggcctggaactcacagcaatcctcctgcctcagtctgtcaagtgctaggattacaaggcatggaccaacatgactggccaggatgaaaggtcttggtaggagaaataataacatcagtgcttgattctgcagcagcagtctgaatctgccgaagggtgagaagagagagcggcttttgaggaaaatatgacaccctcctcaattctacccttctcaccgctcaccttgcccactcccaacagctctctctccgctgggctagtcagtttacacagcaagaacagcgtgaaggctgcgcgattctgctcccactgaagaacacatgagcctggtgcaaagcctccacatgatgtccacggtcctatccaaagcgtccttcaaagacacctgaggactgaaatgacttcctaggaagatgctaccaaagccttgcttttctttttctttttccttttctgctggcactgggggcagaggctgaacctatggtcttatgtgtggtaggcaaactccccaccactgagctgttagttctaggcccatccaaagccttatcctccagacttttaccattccaaaaccccagggaatgttgggtacttggcactaggagccatcattttcatgatcatcctgctagactaggctgaagctaggtaggatgaatggacagacaatggacaaattcactgtagtagttttaaagttatagccataccctgacaccacagtctcccttgtcaactgccatagagctctgctgtgagaactttaatctagtttgttttcctttaatatggtttaaatatccatctgattcttaatgcacagtagatattagggcacagagcagcttttaaatggatccatcccctttcaaatagaaaatggaactgtccaagttcattaaaattcagcattggaggttacttactgagtggttatgtaatcagatttgggcttagaggccgagaataaacttgaaagaaagtgtccagacttggtcagatgaagagaacatgagacagtgatcaaactactctgggtctctcttctcgaatgctgatgttgcctgactcttctgggggagacacgagcaaatgttattcacccaacatagggtaccaatagaccaaggcaacacggccactcaagtctagctcagtgaaccaatgagttttactggagttgcttacagaagcgtgggtgaggggtttcttggaggaacttggacaacttacaggcagctataccaccaaggaaaagcctgtctccaccccaaccactgttaaccacttacatgtcctcagggagggaaggacctgttttccaactcatgaatgttcctctcacttccttatgctgacagtacaatctgaggtcctgttggtggcggtcccgcactctgactcatgactgcaacagccatgccaatgcctggagaagacagtcccccagccactagtctctgtaagtcccctccctgcctttgagcctagaggctaacttgaccatgttagatatgtcccccctccccaagtccagtgatttgtgatcctttcccctgggatagtgtaaatctccacttgagtgtgactgccatcagtattccatgcccaacgacaacagcctaactttagaacaacagaactcggaggtgagaagtctccttagcattgtttgcacacctagcccaaactcacaccacagtctatgacaagaactgaatcacatctctgggttctcccacactggcttcctcttgtcttgctaattcaccataaatttggagccacaaaagttcaaaacaaagctgaaccctgtattgggcattaagccatgagtcacagttgaacagtggcctctttctttccatgttagccgtgtttttcctcccctgtggcccaaacaagaatcaactttgtgacaataattcattcagtgctgccttggagcaggcactgtgttgggaggtgacaagttctgcagtgacccaggtagcaatgtgcctaccgctgacagaatgctgggtgaaccctgcaagcagagctcccaatttcattcccttgcaggggtcagcaaagactccccacagaagaaaggcttcccaaacgcttaaaatgcctgggtgcaggagatgaccctggagggaggagggagtgagggagccctgggaatgagctctctgacagccacactgactggactgggacctgtggcactttctaaaactgagtgtgttgggggtagtttggggaaggagccccctccttgagtgtaggggctgtgcagcagagtggccatccaccacttactgacctctgcccttagtgcccctgtcagctcggctcagcccttcatgcttatctcaaacttgcacctcaaacttcctctcttcagtggcactttttgttccttgtaggggatactgggatctccaggtcaaattctttcttcctctctcttttagtttttccaaatgttcccatttgctgttggctaaatataattttaagacattagtcttgacataaccagggagaaaatacacacaattcccttactcagcaacacaaggcaacatagacctaaatgccagatatacaccccagacagggaatggtgaaggaacacagagggagggatgttaccctgcggctggaggctagaccagaagagaaggtagagaggcaagtaacggaagcagctactccaaaaggagcttccagctggagacaacaaaataaaagtttagcagttaggagtgtgcagcctacagcttctgtcacaaacccaccgtgaaatgcaagagtcacagctgaagattcaggaagatgcgtcccagcccgctgaagcaatcgatggttaaggacctctcaggaccacataataaatagtgcgtaatgatcctgttacagagggcaattactctgtatcagacaggagtcaattattcctaatcctcagttgtaggtgagaaaaataaagcattgagttgtgatggggacgtccttctgcaggctgtgactaaatgtttctcttattgatgaataaggctgtttctgcccgtggacaggcagggtttggccaggcaggaaatccaaacagggatagagaaaggtagtggagtcagagagacaccatgtagcaaggaagcaagaggcctggatatcacacgtatgccaagatcacatggagatacacagattaatagaaatgagttaataattaagaaagagctagccaataagaagcctgagccatctgctaaacagtttataattaataccagcctctgtgtgtttatttgggactgcatggctgcaggaccaggagggagggacagacatttccgtccacagagatgctaaacaccaaaaccccaaacttgtccactgtgtatgaataggaggcgtcatagactggacgcattggcctcgggaggccatccttccaggcaaagctgccaacaggaagaattctagaaacatggagaactggacatgcttttgtagttgtggtaaaaagagaaacagatgaaaaaaatttttttggtgtttggagaggaaatccattttaaaaacatattcgctttctccaaatgcctcaaaaccatcacttaaacataaaatcagcatgaaagcttttcctttcgctttgttttcttcgtgtgaactccttccacgttcatctgtgtatttttaatcttacagcatattccgactcaaatgctaaatttgcaacagaaatacttgatctgtattcatatttcacaaatttatggctgcaaaagtattcacatacctgatttattccaaacatacttcaaagctttccgatatctagggtgagtaccaaaaataattttctctcttaatatctgcatccatattgttcagtctagctgctttattttagaaccgactttaaagtaaaaccccatgggtttcaaaaccgtctcgtttgttaactttatgtgactctgtactgttgttcatttatttattctttaagtttagcacacaatggtgggttatcttagctcgccgctgtcccaggttacggtccatgggcccctcctttctctggttccttttcttaccgcaggtaggacccccctctgccttccagaaccctcccctaagacctcttctcccctccgcctcacctccctagttttatgaccaacaccgacacataaatacatgcatatgtacatttctcattttaaacacagatcacccacatcctggttttgtctgacaaagagcgacttaacgggcttatctcagctcacagttccaggctacagtctatagctgaggggttgccatgacaacggggacccgagcagctggttcaccacatccacagtcaagagcagagagaaatgaacacttgcacactcactgcctgacttgattttgccaccagtgtataatcctcagcccagacccagggaatcgtggggcctagttcaggctgggtctttgtgcaccagtgaacacatttgaggctgcatggacgtgcccagacaccaaactgctctagacaatccctcactgagtctcctaagtgagtctcagctgtgtccagttgacagttaaaaaccaaccagcacagagcatacaagaaaaatcgtgaggtagtcggcttcctgtcaactaggtatcagcatgaaattcaaaggggttagaacaaagttaccaacgtctacttcacattctttagtctttgcaactaattagcataacagtcctgattacaatgaaaatctgcccacttagtgactgattcatactgtttaaaaaattcaatttccacataattttttgtgcctaccaagctagatcacagacaagctttgcttccctcggagcctcaagttagcttattcatgtacagggtagcaacaagagacttaattcaccctggtgtcttggattattgaatatccaacaaatattccttttgcttcaagaatatcttaagaactaaccatgaaatcttggcaaagctcctccaccctgccaatgctcttcctaccctcggtaggtgccccctgacttccatcaccctctcctaagatcccttattcccctccgtcatcacctccctagttttatgaccaacacctacacacactgagtgttggcagagagcacagataactgtcttctatttctacacaagagggtgaatcatagcatgtgcacacctttaggataactttgagaactacacccacgagcttgcaagctgatcacaagcatcttcactatgtatcatttaagtggaacaaagagcagggtgttggtggtgcacacctttaatcctagcacccaggagacagaggcaggtagatttttgtgaaccagcctggtgttcatagtgagttccaggatagcaggagatgcatggtgagaccttgtctcaaaaacaaacaaataaaatagaggagcaaagcatcaggcagaggacgagcttcttgttttgaaactgccctgagtccagggaggcgtggtcgggattccccagtccagctatccatgagaggcagaggcaggagagttggaggacttcagggtttcataaacttagcttcttgagaagctggaagagacccggcctcaaaagccaagggcccggggtatggagcatttgcctgggatgagagaagccctggcctaagccctgaagccaagcaagcaagcaaacaccacaggcaacccagtccttgatctgtggtgagcgcccttcactgtgactcaagttacgcttgtcttctctggcagaggactttgacagatgtaaaattcccaagtgtctatatgaatgaactcaatattcacacaatggcagtacttttaaagagcatacgtctgaaagtcctgtgagacaaatctaccccaaatgtcaactggctgtgctccttgcatcatgtgactttctctgcagctgaagaaagtccctgacaaacaggattctgaattgatcaaattttgatgctgtcgggaagactttgtattccagtgcaattgtttggttgcttttactgaagaacttttggctttccctctccagctttattaaggcttgcctgacaaaatctgtacatttttaagatgtatccatttgataggtgctgtgacaggattgccaaataaaaccaagcatgtggtgatgtattatttatgatttattaaagcttgtctgtggattcagaaaagcaaagtcagcctcaagctatagagatcagtggtgatacacacctttaatcccaacagccagaagctaggaggtggtggtgcacacctttaattctaggactcaggattaagaggtaaatggatctctgtgagtccaaggccacccagatctacacaagattgatccagtcctaaagagaaacagctcacacaaagatgatctcatcacccgggatcacacgcctttaatcctagcactagaggggtataaaagatagggatcagggtcttcagtagtcagcatcattctccaggcacactggggataggaagacattcagtctcagaattctacagccacgctgaggagaggcagcagcagcagcccattcagcctgaggtggctgtaagagccagtggcctgctactttgcttttctggtctccagcttcaagtttgaaccccaatatcagtctctgagtctttcatttttcatgatactcaagtattttacatcgaccacctcaggtaccctttaatgagtgatgggaatacttaagatctaatgtactatacattaccagtaattaatacattctcattgtgttggttttttttgggggggtggctagggactgaaccctgggcattgctcttgctaggcaagcattcttccaccccaaccccagaaacattattgtaacagcagctctctggatctccacactgtgaagtatcttcatcttacaaataaaaggcagtggccttccatctgcatctccccatgtcccgtacttcccgtcgctaaggacgaccatgctgctttgactacttagctgccccatgtaagtgagagggcacagcatctgttctggaacttctagcttatctcatttgcatggtgccttccagttttatccacaatgcaggaaatagatttccttctttatcaggctgaatcacatagatataaacatatgtcttcatatatctatctcacattttcttcatacactcacccaccagcaggcattaggctgtttccttatctcatctattgtaaactatgctggagagagcagtctaaatatctccaagatactgatttcatctcctttggatccatacccagaagtaggattgttggaccatatggtagttctgcttttaatttttttgtaaggaacttccaaagctgtttccctaacgactgtgctgagcttatactagttgttaaatgtccttcagatctttcccttacatttccaatagaatttccttgatgaagatggtagtgtctttggctacctctccaaaaataaaataaaataaagtgcttctcctttgggttcgagaattcaagtcatcttgtaggacaacattatgagctaggtcctggtaagaattgcttaaaaatatctattgaacatttaattccagtttcaggtaactaatattgattcttgtttaaccattgaaagaaaagctatttaaaatttctgtcttttcactgaaagtgtctcatgtagcccaggctggcctagactcctgctcccgctactcaagtggaaggattgcaggtgtgcgcacggcatgtggttcactccaactccccgtttcctgctgttataaaagactacaacagactgagcaatttgtaaagaagactgttttcctcatagttttggaagctgagaaatctaagagcatgtcctccttgctgtatcataacaggtgaaggctttgtgaatagaggaagctgactggcaagacagacagcagtggggagcgagagagtgccaacaatatcaggagaaccctcctcaccgtcagtcagtcagcaggaccctcctcaccgtcagtcagtcagcaggaccctcctcaccgtcagtcagtcagcaggaccctcctcacagtcagtcagcaggaccctcctcacagtcagtcagcaggaccctcctcacagtcagtcagcaggaccctcctcacagtcagtcagcaggaccctcctcacctcaggatgacaggagcttgcatggtatgtgagtaacatctctgtttaatcatggtttctgattttgcctgtctgattcttcttccagagaaagaggaagagggagagagacaggaggaaggacgggaggatggagaggagtcctcttataacagatcagcacacaggggtccttccaataccatcacagtagcaattaaacatcaacatgaatgtttttaggggacgatgccttgcttttgcctctgtgccctgtgtggaggacagaagacacactacaggagttccatgtaggtgccaggaatcaaatacaattgtcatgatttttaaatagacttcttttgaattatgtgtgtgtggatatatacacctgagtgaagatgtccttggaggccagaagagggcgtcagatgccctggaggtagagttagacttggatgtgagctgcccagtgagggtgctgggaactgaacctgggtcctctggagtttaagggctggcaagagggttcagcaagtatagggcttggcaccaatcctaccaacttgagttcaatccccgaagcccatatattcaaaggagagaactaactttcaggagaactaactcctgaaagctgcccctgacctccccatgtgcatgcctcaaataaataaatgatgaagaattataactaaaatttaattaagtttacaggaaggccatggtgacacacacttatacttgaaggatgactcaagagtttaaagccagcctgggtgatataatgagttcccaagccaacctaagatataggaaaatctctgtatcaccaggaattggtagtgagcacctttaatcccagcactagggagacagaggcaggctatctctgtgagttggagtccagcctggtctacagagtgagttccaggacaaccagggatataatgaagaaaccctatgtcaaaaaacaaaagaaaaaaatctctatatgaaaattaattaactaattaaattgaaaattcatttaggctaactacatttcccatgctcagtagccacatttggctggaggctactgacttaggcaacagactacacagcccctgactgtctcttggcggcagactcaggtcccaagtgcagaatgtcttcctcagtcccttctgggggtcaggaaaggagcctcctaggagacactttcatggccctctgggttcaagacctatagactggggttcagagaaccaatagggtgggggtgtaaagtgtatccacagctctacttcagagtcactgtagggcctctgtagaagaatgtcgtaggtaggctactccagagtctctcttaaagaccagcaaggtctgtgcactctgtcttgttggcaatgaaacgcttcccatccttccaagctcaggaaactgatctgcttcctgcttccagggggttctttgcccaattgcctggagtgcacccaccgtgtgaaattgtgtttagtaacaaggaagctcattttagcatactccccctctctagctcgtattctgcctcacttttgcctctggagcaggcctggctggaatggggagactccaaagagacacttgtgtttttcagtctgactacaaggctgttaaaacaatcgacccccaagaaatggcaactttcccgggaatctcatgctgggaaaagaaatagataccagcttgagtgggaatctgcttcccagagagagactccactcggttctaacttgtcagcccaccttacaggatgagactgaagcccagacatagatagatcagtggtgggtggggccgcgtcttgaccaggattgcttaggtggacatatccttggccttagatttggtctcacttcaggaggacccagaagatggactggggggggggtgcaggggtggggcggggtgttactggatctttttgtccctcttgtcacggtggccacactgaatatataccccctttcccttctccttactttgaatttgagtctcctaattggcttattgagaacaggtgaccagacctgacttgggtcacaggttgtgacgccactgcactttccaaacaatgacctttcctcttcatctcagcaggacaatttcccctgtggtccaggaagtatgtccaggcagagctccagggatactgtgtgggtccctcgtgtctctccctatgctgtgtgttgcccaatgaaaacgactgttccatgtattcccccagttttctgttcactggtgagcggagaagcccagttgtgtgagcatttgtgtctgggagtctccgtggtggcactgtctgcactgctcaaagcttctctgacatcctgttttcttccctgccgccacagtttcgcccttcctcttctgtgttttcttctccccagaaatccaaaggaccggacttccctggtctttgtctgagccacccatctgcccctccagcccttgcactttttctgtggtgtgtctcccccagggaggccctggagactgtcttctggtatcccactctttttctgtggggattcctcctgtggcgtctgagggctggcagtctgtcttcgggctggatcagacgtaggtggcaaaggagccttccctctggtttccctctttgacagaacccagatgcctgttcaagctcaccatttcaaaaatagagggccgacgtttttctctcaagaatggaaaattgcatacacataccgatatgttattccctgtacacagctgtgtagagaatcgaataataaccattcacccagcacccaggtagaaaaggagggaagcattacagatggagtttgttttcccttcttacttttctcacaggtagtaagcgggctattgaattcagtgtgtcttaaaatgttactaattgctatcattagactgggtgtgccacacgcctgtgaagtcaggggacaaggctgtggagtctgttctcgcctccacctttactggggtcccaggatcaaacccaagtctccaggcttgtgtaacaagcaccttcactcactgaaccatctcattggatctgaagtctcataaagagtgtgtgtgtgtgtgtgtgtgtgtgtgtgtgtgtgtgtgtgtatactgtgtttacagtttggggacatggaatatgaagttttctgtgtataaatttgtatgtatacacacacacacacacacacacacatatatactttctatgtattcataaacaatataggatacatattttaactccattaatgtatccaaggttatcacttttatgaagccctgtgcctggagacagaagacaaaaacaaaaaagaaagacattcagcagaattccatttcccagatccaccctggagtgtgcctgtgtggggaaaacagagccagttaactgttgtttcaatgttgagccttggcagttgcagggaaaaggcaactgtggctgcagcacgtgtttgccatgtgtttttgtttactggccttgggggagaattctggagagaataaaagggcttcatggaagaaggaacagtgtaacaaccgtctctgatgtaaccacagcatctttaccaaactgcttcgtgcccaccgtgagtgagtcaggcgctgtgctaagtgctttctgaagcattgtgtctggttcccaaaacaacctgaagaaagcgtgtttgtccctgccttagagatggagaagctgggctgcacagactgtaactgcatctatcttcttcctgaagggcaggccctcttcccaagtcttagtgagcaatcttccctcagggactgtgccgacctgttaagcccaatatgtccaaaattgttctccccactctgaattcttcccagctacagaatcaaaccttgttttagtttgcttcctattgctgtaagaaaggccacaacctaaatcgacctgggaacgagagggtttatttggcttacacattcagatcacgacccatcactgagggaattgggaacttaagcagggtaagaacctggaggtaggaactgaagcagaggccatggcttgctccccacggcttgctcagcctgcttttcctacagaccgggaccaccagcccagggatatcactccccacagtgggttgtctcccaccccccaaacagaataaagaaaataccccacagacatacccataggcctatctgatggaggcatttttctcaaccagagtcccctcttcccagatgacccaagaagcttgtgtcaaggtgacaaaaattaacagcacaagcctctaagttccaggtgtaacccgggactaccctgttctaaattcttcactaattcctcagtgcccaaacagctctgtaaaaagtccttgccttgacattccaagtccagttcctttacactcctttaataaacctggttttattgcctgttctcctctcacacctcagccaactgcctgctctggctcttcctcttcccatcttccgtttacccatcggacctcagtgtagactgccagggttttcacctcctaaccagaaaacccctcttcctctcccagccctgagtgaatttagtgcatcccttatccttttggattacctgtgatgtctgtgtgcttgcctttcccaaccccatgaaactggaaactcccaatgagccgtccttcctcacctttgctcctcctaaggtccaggaggacacagggctatctgagatccttgaattgatgtagcaccttctctcctcagaggaccgaactcaaacaattcatgttgaaatacagagttcagcctgggtgcagaatagaattgcatcttgcaggagcttaaggacacgctcctatttcatcctttgtccttgatctggagaagctgggaaagacaattactgtaattcagagtgtgatagtaagacaagtgccggggacaagggcatagctaatcaagacgctgggaagctgtttacattttacacaggccttgcctaatactgggagacagtgctccatgggcaggtcagactttagactttctgtaaaggcattgtgaagactttcatagttctaagtggaaggcagagggcagatgacagagggtgcattgtgtagtgtacacacagtgtacagacggcacacacactgtgtacagacggcacacacactgtgtacagacggcacacacactgtgtacagacggcacacacagtggctctcagcctgtggatagtgtatgccgccttattcccgacttccagccattgcacaggaggtatcgggcttgtcatgggccctggggtcctctccacacctctccacactcagtgccagagaaccgtaggcacatgataggacatgagctttgcttctgtcgtggtgttttttgttttgttttgttttttgttttttgtttttcttcctgaaagagaaagaagcttgtgtttgtataattttcttctctgctctggcctacttcaggctgtcagcccagtctagtcatcttctttccccaaattaatatacgtgtcatcacctctctttaaaaataaagatccactccgccagctccaatgaccttaaaaactctattaactccatacagctaaccttggactcatctttgccttctctttcttcctccctttgtcatccctccttcccccagaatggaactggttcagcttctgcccctttggtaaagggtccaattcacttgattattgttcaaaacctcggcatcatttgtagttgttccggcttgatagttcccagcctacaggccgcgctcgtgtgtgtgtgtgtgtgtgtgtgtgtgtgtgtgtgtgtgtgtgtgtgcgcgcgcgcacgcgcgcgctcgcaagtgtgcctgtgagctcatgtgtgtacacgcactaaacccattatcttagacatacgtgcatgctggtgtagcacgctataactgagctatatccctagccatttgttacttgtgctctgaccctgtagctcaagctgaccttgaacttaactgtttgtcttgatttgttttgggggactctggcaagtggtccaccactgatctacaactttggccctcaaatcccatcttttaccaaaactctctatcatttcttctgttgcagctcccgacacctattctcaaagccaagtttagcttaaaccactcattgcttaggaattggggcaagggttgagttgggagatttatttatcgtccccaaacacagtttgcctcttctaccttatggctttagctgcctttggggagctaggggcggtagcatggagaaccccctatgggtgcacttgtactcaccgcttagcgccgcactgcccagccctccttcatggacactcgcaatcccctccaaccaattccttccgcttctacttccacgacccgctgttcgggaaacaccacttcccatcttcaccaaatgttccccagctccgcctccccgatctcagggcaggtccaagatccactgactcttagcggatatctcccgaatctgccgcagacctggccaccccggcagcttcctggctgtcatcctttctcattccacacgccacagctctctgctcgggacagtacacggtaccctttgtgctccatttattctgtgtcctctcccaagcctctctctccagcctagacctctttctggccagacttcactgcccaactacttactccatttccctcagatgtgacatgtctagacacatgtcaccacccacccccaaccccatgcactcaatctagatacctgggggtcatcccttcttcttaagaatatatatatattcttaagtccaaatctgagctctgtctcccaccttgcaagcagatcctggttcccactctttcctttcatctcctggatcccactttacccactgtaatcagttcgtcctctacattgccaaaaatgtagtttttctagcatacaaatctagacccccacacacaaggctcccctcctgtggtctgcagagttaggaacagtgtcccccagaacagtgtccccccaggtacctgaactacctcttcttagagttcccaccccctgttccttgctccccatgcttagaacaatttcctttctttgttgtggctaacttctagctccttgatgatcacatgccttcattcagaacctttccttccccacccacctgggagctgagggttccacacactactctgtatctactactatttagacaatagaatgccactatcatgaggtttggggttttgcttttacctgtttctccctgcttgtgacttttcctggggacttggtgtctatccatgccacatagagtaatgcaagaccgaagaaatgatttcattaaaatctaacatggtaagccagttccattctggttacttccaggaccgtgggcacctgacaggtagttaaccctctctatggcttggtgcttatcatatagtgtcctgaaggagactctatctccagatctaacctcctctagaacgaacgtttccttagtgtggagaccacatgcacactgaaggcctttaataaatcccttttgttcatatacaggccaactgtcctggaccaagagagtcctgggagacaggacttcagtgctagaacctgaacagtccctagcaaagtgtgctctaccagctcacccaggctgcttgagatatgcaaacatgcttagtttccatagctggactttaattgacgtgaaggttcaccgtcgttgataaattttgtctcatcctcttatgtactccaaacaactgacagggtatcggccaccatttgtaagcaggagcaagagtctatggtagcaaacacccagtccatcctgcagtcatcttttgtcaaagcttcggctaagcatgaacagagccttcggtctcaacacagttttagacgagaaagacagacaggatactataattaaaaagataaaaaaaaattaatcaggtgacttgtgtctgtgattctagaactcaggaggctgaagcaataggattgctgagagcttaaggtcaccccgggctatagagtaagtttcagaagagctgggcctgtgaagtgagaccctgtcagaaaaaagaaaatgttcctgaatgtgacagaaataaccaagaggcatgaagagtgtcacatagatgagagagaccagagagaagctccacctcactctctttctgccaggttcttcatagtggggccctgacacactggaagtatgacatgcgtgatggagatgacattcacaacatacttacaggcccatagtgaccctccctccctccctccctcctcctcctccctccctccctccctccctctgtccgtctttctcttccctttcaataaggtcttgctgcatagtctaggttggcctcagatgtccagcctccctacctcagcctcctaaatgttaggattttatgaacacccactgcccctgactcatacactctgttggtggtggtggtgagggtttgtttgtttgccttttgtcgttgtttttgagacagggtctcactatgcagctctggctggcctggaacttgctatgtagtccaggctgtcctggaactcacagagatccgcctgcctctgattcacacggttctgaaaaactgatggctttgttacggaagtcaaaatagaggctctgtgaatactgagtatttctaactcggcaattcccgaaaaccccctcacactacgattattatttcatccaactggcgacatcacactactgaaggtaaaagtcaacttgctggcttttcaaactgattttctttttttcctcctgcaaatttgagcctaagcagcaagtcaaggaaagaggacagacggctgacattcagcagctgtgtgttgtggaacagcaacagccgtgaactaccaactgcctcttcaggtaaatgaggaaagatcaccctcagactcacgtaagagctgcatgttcacaccaagccgacatgcaggtttttacttcaccgcatttcataatgcggccagaggccagggatgcgtcagagcccaccccgcccttcttctttcaggtcagattctgatacaagatgtgacagaaggtgttttcctgtggctttggcattttaatttttggctgcgtgttatgtaaaacatgcaaagctttatagtgatgaagaaatgtcaggggactgatttatagccagcaagattttctttcttgatgatcgtctcaaaagttggttttcttcaagtctcatttatttcaaacgtggtgtctgttaaattttctctgactctttcttcccaaaccaaatgagatattttcccacaataccataaagaacatctgtggtaagtttttgtttgtgtgttttgttgttgtgactgtgcttctgttgttttggtggttttacttactttttctttccgtttttttgttttgttttgttttgctttgttttctgttttgagacagggtctcatgttgcccaggctgctcttaaacttgttacatatccaagccctgccttggactcctgatttttctgtccctacttcctaagtgctgacacttgcgtacatgccgacatgacaggcttatttgatatttgtttcagtctgttcttctcactgggctactgtaagggccacactttatttatctccatttctggcaactggaatattacccaacaccaaggcacctataaaatgcttgtaggattttattattatagcatggggagattgccaagctcaggctttttagttgcattctgcaatgacattggtacatgacatgaactttacaattctgtctgactcctcagtctacataggtcaaagatcaggtagagcaagtgctagccaacactcatgctctcagagatggctcacaggctccctggctgagagaggagagagagaaagagagagagagagagagagagagagagagagagagagagagagagagagagagtcagatgatcgccaggcagcagaacacttcgggcacattcacacctctgctccatccattctggtcacctacaggtctcttgcactactcaccccaaacagatctccagtctaaccgattgccatgggccttgtggaaagtcctggttggctaacacagtagcccgaaacagactgagttgaaatgatgagcttaaagaaaattttataattaaaaagagaaaaatggtaccagttgaaaaccaggacttttcaccttgtcctgctgacatctctttctgaagtcatgggaattcaaaacacctcaacacacagttgcgtttacaaagcacccggagaaaccacatagaattttagtgcttgaaaacctacagaagtggctgggggtgatggcacttgtctttaagtctatggctctgggaggcagaggtaggaggatttcaagttcaaggccatctgaggttatttttacaagaccctgtctcaaaaaacaaataagcaccaagtatgtgtagggagacaccgtaacctaagggttagggttgcctgaccacgcccatcaggatgtggtcaaggtgatgtcaggttgatgtgagagatatttaaagggttagagaacgcacatggtagccctcttttcccctgctgctttggcttgctctacttgcctgccggttgactcaggaattctgcaaggcatttacctaataaatatatcctgaccattacaggctacgtattagtaattaatcgtaataaatatggtttaggtaaaacaaatttccataccttttaacagcgcacatggcagcttattagtcgaaagatcgtcttgcacatagctaatcttcagtaagacagttttgtttgatttgagacaggggcatcctatgtagtcctgggtggccaggagctaacgatacagagcagcctagcatgggactctctgaagttgttcttcctttgcctcccaggaggaggtttgcaggtgtttgctaccacacagatgggtcatagtgaccaaatttctgtccaggacgcagatactttaagacaaagggtggaaatagagttttgacaaatacctgtgtgtaaaagtgttgtctttagaaggttcgtttcgtcaagtgttgtctttcagatgtcgcattttaaacccatgccaacccttctgagaaggctgcactgagaactcttttttcctaccggtgatgactgtaggagacaagaccctgacaagctaagagtgatatgacaggcatgtaccactaataccatttaaagttgggccaattcactgctatggtccccatgttccagtggatagccccacatccatgcacctaagggcagcaataactggacttagtgggttcaagtcccagcccctccatggcagctcacaactgtctgtaactccaagatctgacatctccacccacaaatacatgcaggtaaaacaccaatgcacatacaataaaaaataaaattaaagacttaatttcaaataatcacctcaaggattctgacacaaggaattcagttgccagtctcagaaacggttgagagctgaacattacattgctctataccgactgtttcagtagagaccaggagcaattaagcaactcagttcctgctttcttggtgctttcaaatcttcagaggagaagaagcatgccgccggcagggagtgcgaggcagcaggtcctgtgaggaatatgggtaagacctacaattggaacactaagaagggaggcagcccctcggggcagattactgtgaatagctccccacaaggtgggtgggtgtatagctgggcttggaggaaaagacatttcaacaaatgtggatgagatggatcatttcaaggaggcgggactgcaccaagtgtgaagaaggcgggatcccaccaagtatggagaaggcgggatcccaccaagtgtgaagaaggcgggatcccaccaagtgtgaagaaggcgggatcccaccaagtgtgaagaaggcgggatcccaccaagtatggagaaggcgggatcccaccaagtgtgaagaaggcgggatcccaccaagtgtgaagaaggcgggactgcaccaagtgtgaagaaggcgggactgcaccaagtgtgaagaaggcgggactgcaccaagtgtggagaaggcgggatcccaccaagtatggagaaggcaggattccaccaagtgtgaagaaggcgggatcccaccaagtgtgaagaaggcgggatcccaccaagtatggagaaggcgggatcccaccaagtgtgaagaaggcgggatcccaccaagtgtgaagaaggcgggactgcaccaagtgtgaagaaggcgggactgcaccaagtgtgaagaaggcgggatcccaccaagtatggagaaggcaggattccaccaagtgtgaagaaggcgggatcccaccaagtgtgaagaaggcgggatcccaccaagtatggagaaggcaggactgcaccaagtgtgaagaaggcgggatcccaccaagtatggagaaggcgggattccaccaagtgtggagaaggcgggatcccaccaagtgtgaagaaggcgggatcccaccaagtgtgaagaaggcgggattccaccaagtgtgaagaaggcgggatcccaccaagtatggagaaggcgggatcccaccaagtatggagaaggcgggattccaccaagtatggagaaggcaggattccaccaagtgtgaagaaggcgggatcccaccaagtatggagaaggcaggactgcaccaagtgtggagaaggcgggattccaccaagtgtggagaaggcgggattccaccaagtatggagaaggcaggactgcaccaagtgtgaagaaggcgggattccaccaagtgtggagaaggcgggactgcaccaagtgtgaagaaggcgggattccaccaagtgtggagaaggcgggattccaccaaatatggagaaggcgggattccaccaagtatggagaaggcgggattccaccaagtatggagaaggcgggactgcaccaagtgtgattgggaagatggtattatatccttgttgtttttttaaaaaaatatttaattagaaacttcatacaaatatttcttgttcatcacattcccctctcatttattaatttattaacccttcttattctcttagaaggcttcacatctactccaagttgcaaatacctacatgatttaatctatctctgcaaaatacaggaaccacaaaggagaggaaacaggatatttgtctttttgaaactgctttaatcagcttaatgtttttatctccagttggatcatttacatacccatgacataaatttgttctttatggtgaaaaaaaattcattgtgaatacacacaccattttctttatccattcccgttggttggttggtttcataacttgctagtgtaggtctagaactcaatttgtgcctaactctcgatccccctcacgcattagtgagtctgcttatgttcttattaagtccaaagggaaaggtgtgaggcttgcaggagagcgcgcagcccacaggggacagtgtgtgtgtgtgtgtgtgtgtgtgtgtgtgtgtgtgtgtgtgtgtaggggggtgtcacctactatcggagcatcacatggaaggcacaaaaactaactcgaaccctccttggctgcaaatttagagaagtttactcggaatctccaccgagatctgaacttgactacggatgaccgaaggccttccagccgaaggggtcaaacggggctaagttcgaaacggagaacttcttctcagagggcgtggacccgcagagttctctgaggtggcagaggcgagctcgcccaaaccccaggcgagagcagcgctcagagcaccgcggcggcgcccaaacctcgggcgctacaaaagcctcccaaaccatcaactacgcggtttcggacccgaaggaccagggcccgcccaggagcccagcaccgcgtcccgattggacgagctcactcctctccacccgtcaatcacatggctgtgacgccaccttcgcttcgccccgccccgccccgctgacgccacagtcggccttcttaggtcctctctggccgtgcccgccgcgcctctgcttcccgagctgctggtctccttttccgttctccctctgtcaggagcgcagcgcgggccggagccgacggcggcgtttccccgcgcccgtccctccggagagcgttcctcgcagttgtgacgcacaggcacaccccgcccacccgctcaccgcctccacttgcgattggctgcagcccgcgtctgtcacgcagcacccccctccctccccgcgctggactcccgagagacatccgggaggccacgccccgtccccgcttcgccctgtgattggctgagggcactggcatgctttcccgccccggccccctccggagcctcgggaggcccgtgggaccccgcggaagttgtcggccaaacccctccctccgcccccccccccaggaccgcccccgggccgcgggagcgcgcacggcaagcacgcgcacggcgccccctgcccgccccaccgccgccgcagccatccgccgccgccgccccgcgccgtcccagccgcccgctcgagttgtagcagtcgctcgcccggcgtgctccgtgggcgtcgtgtgcgcgcgggggagcagagccagggcgacgctcgctcgcagggtccgggcgcgggtggccgccgcggcgcgatgaggggcgcggcgctgacggacaggcagggcgaagcgctcggcggcggctcgcgcggaccggcgatggcagcagcgccccgggaggaggctcccggccgggcggacggcgcgggtagcggcctctgaggagccgccggggctccgcgcgctgaaagggggcgccgagcgcgcccgcggtccgcaccccgcgctcgcccccagccgtcgtccaaacttcgggctcacctccgcccgccgctcgcccgctcgccccccctcggcgggcgtccagcacacttgtggcggccgcgccgcgcccccctccccccccccgtccgccggccgggatgcggccgtgaggcgctgtcgggcggggagcagctcgcggagcgccaggcggcgcgcccgggcccggggcgcaggggcgcaggctcgccgcgcccgtccctcgccgactccccgggccagccgggctcccgggccgcggagatgtcgtcgccgtcgccgcccgcgccggtttcctgcgccgccgccatctcggccgcggagaaagtggacggcttcacccggaaatcggtgcgcaaggcgcagaggcagaagcgctcgcagggctcgtcgcagttccgcagccagggcggccaggcggagctgcaccccctgccccagctcaaaggtaaagccggcgcgctcgcccgcccgcccccagcctccccccccaccccggcgagccccgcacctcttcccacatgcccccggtggcggccccggggaccccgactccccactcggccgagcctctgccctggctccccccaggcttcgccagctgctgcttcactttctctgctcgcccctcggtcgccagacccggggtccgagtgcgctggctgctgccccgagtgtggagaggcgtcggtgtcagcccccagaagaccgcgggtgtctctggagaggtgtgcggggaggactgtgtctgtgccgtgcaccggcagctcggttcccgcggctgtgcctgccggcacctcgtgagtgaggttttgcacggtggttcaaattggtgtggtgcccaatgccttgcaggagtgcttggcacttcttttggctcacttacttttcccactgggtttgggggcttttcacgaagttgttttcctggcgctcttgcttgtccttttgagaattacttgcatttggtttaatggtcttaacgcctttgcgtcttatgagctggatgtcactgtgggaagataattacgctcctaggtatttgagaaattcttgcaaacctgataggagtctagagaatgatttacaaggccaacaaattaagggctcatgcctaaatagataaacgatcagcagagttttcagtgcgtttgacagagatccagcatcctttctttcaaggccagtctggttctgatttgtctttgggtctgtgaatcctaacttagtccgtcaggcaaggaaggagtgtaaagaaaatcccagctcaacagttgaccaacaacagattgggaaccccgttcagacccgacatctgcctcttggggtgcgtctgagtcaaggacacaccacagcggacttttgaaaagagtgtataaatgttcaatgtgtatttcctttgttgttgacatactaggattgtttgaattgataacagcgcggtcagtggagtgcagccatagccgtgaaacaatcctgtcttacctgttaggctattgaatcactattcagaggtttaagtttttatacaaaagttattttgtacttggttgtttttcattagtttatcgagttatttttagcttgaagtcttgatactagtatttttctttcatatttaatcctctcaagtgagttattcttgttcttcatattgtactttagtgcttttacctaataatttgattttaaacatctggttagtctcaagagctgcagttttaataggtctttgcctttaaagctgacagaaatttatagaatcactaaccctattctcagtacatggggtctgactcaagaagttgcaggtaccataagttgcgtttatgtacagaatttggtcagtagtagaaaaaaagttgaaactccagaccgattttagatatttgtttgtgttctattcctaaaggtgttactcgctataaactgatgaagattcaattgaggaaataaaacttttacttggaaataaaaccctagagtaggaaaaagaacttttactgtagttgccaaaatgctttgaaaaattgaattgttttacttggtactttggcagtgcccttgatacaacagtgttgcatgttttttctgccagtagtatttctcccccacttaggggtttaacaaaaacaccaccagaaagccctttagtatgaaagagaattcttcctgctctgaaatacagtcttactgtggagtgattcagatatccgtgggcatccgagatctttcaagtatttatatcaacctgcttactctacactttgtccacacggatccggactggaaagatgccaagtagttttcttaaaagcagactgtgagtaaggattaacaaaacagtacaaccttttcagtttatttttgcaaaatcatgtaggtgagtgggctgcatgatttttaatgttgaaaacgttcaaaataaatagtaagttcctctgagctgggtgctgggaaataaaattaggaaaattatatatgaatcttttttttttttctggcctggcaacttacattcatgtaggatgtaatttttttttcacctaaaacttgctatttgataatgaataattaggaaacttgtcatttaaaataggtagtctttcagtgtctctagtctgttttgttttaaatttctgggaggattggcttggtaaaacagctgattgcttatatgtataataacagcttagtatttcaaatggttatctttaaaaagacaaaccagtgttgtccctgacaactggaacaacccaaaatgtgtattgttgacccttgtcatctgccttttcacacctactgtggttttgctgttatttgacagtctagggctcagtattttcacaaatatctttctttggttgacactagtaactatttaggagacagttgaggcttaagaaggttagtttcaggcggttatctgcagggtgcttcatcggactctggtctctggtcaaatgtcagtatttttgccgtaagcttgttttacataaacctgaagtagaatggttgagaaagtcgggtcagtggagttatttagttcagggtgaaaagtcagtttttgatttgagttattttccttctctgtaaagtgggaataatactatctcccaggattggaaggattaagtggaataatttaagtacctaaataaaaataagcaaggaatgctagctcccattcccttttgtgtttgaagatccagattaaatttttttgtttgtttgttttttagagacagggtttctctgtgtagctttggagtctatcctggcactcactctggagaccaggctggcctcgaactcacagagatccgcctgcctctgcctcccgagtgctgggattaaaagcttgtgccaccaattcctggccagattaaaatattttcttaaagattttatttattatgtatacaacattctgcttccatgtatatctgcacaccagaagagggcaccagatctcataatggatggttgtgagccaccatgtggttgctaggacttgaactcaggacccctggaagagcagtcagtgctcttaacttctgagccatctctccagccccagattaaaatattttaaaatgaagaattactaactggagtacttaaatataaactttctcagaatgctatttttgattatgggtatgtgcttgtgagcacaggtgtctggaagccagaagcaggaggtcccctggagctggactcacgaatgagtggttgtgagcagctgatgtaggtgctgggaactgaacagggatgggtcctctgggagtaacatgcttttaacctaggagtcctccctccagcctgtagtgatgcgttttttcccagaacagggatcaaattagtcattgcaattatacatgtctgtgtgtctcctagaatatagtcagtaagcagcaaggaacagaaactgattttgattttaaactcctcttagcatgaggtataaagagggcttggcgagatggttcagtggttaagagcacggactcctctttcagaggtttcaggttctgatcccagcacccacaaggtggttcacagccatctgtaactccagttccaggggattcagtgccctcctttggcctgtgaggacaccaggcacataagtggcacacagacatacactcacacaagttaaaataaataaatgaagaactttccgagaatcattcggtttccttgttgacctctgaagaactgaggctagaacatggcggctggttgaaggagcttgcttagcattaggggaaacgaatgggcttgttttgtccaggtatgtggtcttctgagttaattgtgacatgattggtttttagggcttttagttgtcttgatttgggaaggggcacactaaactacccagttaacttttaaggttcctgggtattcacaagttactgttccgtccaaacaacacctttgtaatttggaaaacactggtgttcatctgagtaagttaagagaaatgttttcagtgggctgtaacatttagttattttaggactgttttctgactattgtcctagcccttctagaagacataattaatttttctttttacttttaaggatatttagaggaattgctaaatatagtgtctagtgctgctatacacatgaggaaatcttttcccctttaaggctggcatcttcagaaatcctgtttaatcatacccccccctcatttttttggttatctttcttaattttggattgtttttgaaagcatataattggggaaagtgataatccaggaaaatacatctagagcactggtgagactgttggggtagagcacgtcctgtgaatggaagatctgaattgtcttcccaccgcagtggtgactcacggttgctttgggctagctgttgctttgggctaactgttgctttgggctagctgttgctttgggctagctgttgctttgggctagctgtttaacccctatgaacttgtcgttttcacctttaagaataatgttctccttgataaaggccctctgatagatggcctttaagattgttattgcttctttgagttttagagacaaaggtttagctacaaaataatatatttgggaaataatagcaggttcttgtgctttttttttatcttccaatttagtttttaacattgtagcatctggggtagagtctagtttaccttggaaagctttaaacaagcccacacctggtctgattgtctgcaactagtctaaggtgggatccaggcatgtttatttttttaaacaggtaggggtcaaggctgagcatcgctagtacagtctgaggcgtctgctggtttaattaattaattgaagctttgtctttccttccctctgatcctcatggctccttactcagccctttagcttttctgccctcacttcaccttctggtatttataattcactctcttaactctgctgccccctatggccgtctaatcagctgcttttccaaaggggaaaatgttggtgtctggagttttcgtgtgctgatgaggtgacgcttttagatcttgctttacttatttatttagctgaatgaaagcccagctattgccattcagtgccagataatcatacttttattttttttaggagctgagaactaagtaggcaagaattgagaacatatgggttggcctggctttaacccagtctttcaggaccataggtgatgatgccagtcaccttggaatgtcaaactgaggtcttctgtctactgggtataatgataaaatgtaatggtgctgtacatctttaatcccaccattctggaatcaaacaggtctctgtgagtttgaggctggccatcctggtcttacaatagcaaattccaggtcaaccaagactgcatagtggacccaagtattttctttcagaaagttttcgtgttgatgtttaacttaatcttgaccacagctttttgtgaaaggtagcagtgaggatccagagtcacttttaatccattttcctaatttgtctttggcttttctgctgaccactttgaataatactagcatttgctgatttgttatgagtgagtgttcagttggtgtgtagtagttttatccctagaatgaaatgataaattttgttttgcaaaactaggtgtcattaccatcttctttcaaaactcatagtaccaaatacagtataacagatttcatgtagacacagtattttgataaaatttcccttggttgtcttagtcacctaccttcctgagttgatagtgccttttccagaatattcagtatcaactatcagagattcattctcttttatttgctttttgttttaacattttatgcctaaaacagttgagaccaagtaaatgagttctgatttcttagtactttgataataaagagtaaatacgggtttggcttgggttttgttttagtgtctgcactgctgaaatgagcacagtgaatacaggattaaaacaaaggtgtttgctctcgaattttgacatagtgtgagctgtgtaacactgttctaggaaagcagttgtatagagtcctgtgtggaaaagtaatacagggttgcctcagatacagacttacatgtatttaaaattggataaagtgaaatggtttatagtaattttttctttttctatttatttatttatttatttatttatttatttatttatttattgtgtgtgataggatctcactgtgtagcctgggagtgacctcagacttactactatgtagccagactggacttgaactcatgaccctccttcctcccaagtgattacaggcctgccctaccttgcccctaccatgccctaccctgtccttaccctgccctaccctgcccctgccctaccctgctcctgccctaccctgtccttaccctgcccttacccctaccctgctcctgcccctaccctgccctacctgccccgccctaccctgccccctaccctgccctgcccctaccctgccctgccttaccatgccctgccctgcccctacactaccctgcccctgcctacccaccctaccctaccctgccctacctcctgccctaccctgtccttacacctgccccccccctacctaccctaccctgcccctaccctaccctgcccctagcctgctcctgccctaccctgccctaccctgcccctgccctaccctgtccttaccctgccctgcccctaccctgcccctgccttaccatgccctgccctgccctgcctctacactaccctgcccctgccctacccctgccgtaccctaccctgcccctgcctctgcccctgcctctgcccctgccctgcccctaccctgcccctaccctgcccctactctaccctgcccctaccctatcctgtcctaccctgccccctaccctaccctgtcctaccctaccctgtcctaccctgcccctgccctaccctgcccagctagtttatattaatttctaaattcaaggtgcagtcttaattgatgaggatgtccttgaagaaaataaaagaaatatttaaaatgcatgattactcttagtgagttattatgtaacaagaaacctagctgctgaaagtttgacatgacaggctgggtttatgtaaaagagtctacttgtctgagcaggatacttgactaataaagcagcttcagaactacttttccccagtatctttttgaactcttggctgaagggatttgtttatgtgagccttttgagtgagcaatgaagcattttagaaatgctatcattctgattcacatttccctaaagagacctcctggtgttttattgttcacacctgttgtagtttgcagggttacatgacccgagagaacctgtttctaacttggatattggagatttcttgggatcacagtcctggatcccaagctaagctaattaattcacctccagcccactgtgaggtgctgggcaggagggactcagaagttattctcttgagcctcctttgggaattgatctcacgcttcttctaaataaatagcattctagttattttatcagaggatctcttgaaaacagggaggcaagtgtgggtttaaaacagtgtaggtggctggagagaggctgaatggctaagagcactgctgctcttgtgaaggactcagattggcttcctggaactcacatggcagctcacaactgcttgttagctatgcacatggcacacatacatacatggagtcaagcagtcagcacgtaaaaataaataaatcttatatacataaaaatagtatagacaatgactagagattaagtgcctgaaataagaactttttaatcactgggcttagaacttgaagttcaggaatatcaaatgtcaaaactagaccccttaaaaatgtatactttgtctgataaaggatgttctagaattgtaattattatcagaagccaagtagtatttgaaatcattattttttcttcaattgataaaagtgaaaaatataacaaaatttttataatcctgaagttagcaaaacttggtgagtttttaaaacaattttttaggtagacttctaaagataaacatctgttaaagttctaagtaaaataagataaaacttttgtagaactatgttgtaataaaaattacccttaccactactattctttgaaaagaatttgcttgcctgatatgaactttgcctttaaaaaaaaaaatctagtacaaaatttttctccctctggtttccatgatacttagaatttacacgatccattttggggattaaaatgttacttaggtaaataaaacaataaattaatcatatttagtaacttatagtggggcaaagaatacatcctttaagaagtttcaatccttaagaagtttgcttcgcattgggctgtcagggaagtgagagagacccagcctagttttattatggaagaagagaaaacggaaaacttcctggagaaacatcaactgactaggaggtgttgggcaaagatagatggagcctgagacccacccatgggacagcattcgtgatccactgttgagcacagcatgtgtgaggattgccagccattgtgtgcttagacactggagtagcagttcctggtcgcactttcgatgttaccttaaggaaagggtccagttagtgcactgcgtttatacttgaccgttgtgaggagtgtgggagatggaaataaggatgctgattgtaatctggacatgagatacaaaaatcgtcttcctaaatggagagggggtggtgtctcagacagagggctggtgaaaggaagtcaagaatgatatggttttatttgaacagctagacataaaatagtagtttgttagttggtagcccaggctaacctcatactcaacaatcctgccatctgagtgatgacattccgggtatgcactacctcacccagctgaaacagtttacagagagacaaatcagatttgtggaaagaaaaataacatttttattgttgtttttgttggtactgctttttttttttaattttgtttttgttttgagatagggtcacactgtagtgcaggctggcctaaaactcacggtgatctgcctcagccatccaagtgctgagagattgtgggggtgagccaccatgctaggcttaaaaatggtaattgatttttgtgggacaggttgaagtacctgtggggaattgaagttgcctgttggaaagttaatttgggcctggagctgactacatggacactatgatagtaatctgggagtcttcagcttgttagtggcgtttaaagcaatggaagttgaagcagctgctcggtagaaatgtgtagaattggaagcggccagagcgtcccaacgtctggaggggacagactgcacagcaaagtcttagcaactgcgcaggtagggcagggaacagcagaaaagtggacggatcaagtaagagctaaaacttttccatgcttttgacagtcttccttctggtgtcattggttattttggggggcatctcagagggttgataggaagattaagtagaaattgtgtaagtagtcagcaagtaaggctaactctttagaaagtttggcagatataatatgtctctctctatatatatgaatacatatattcatttaaatattggctggagagatggttcaatggttaagatcactggctgctcttccacagaactcagggttcatattccagctcccacatcgcagctcacaacagttcttaactccagttccagaggattttctagcctctacaggcaccagacacacttgtgtacagacatgcatgcaggcaaaacacccatacacaggtaaaaaatcttttaaaatgtgtgttgtggctgcagaggggagaatgtattacagcagaacaaggttttaagaagggaagggccagtcaggaggttgcttttaacaggctacttaagtcatgatacagctgtgttcagaatgggagctgcagaagtgcaaacagggttatttaaagtaggttgtacctaggacgtgctaattgtttgaagtgggaagaggtgtgctttgtcctggacacttgactgaactccaccgctgagggagcaagtagggggtaaagatccagttttgttttgtaaactttatgtttaagatcctttttggaaatacagttctaaatatcaagaaaacctttggctctttggttgcacatatgtctgtgtgtgtgcacacgctcgtgcatgtatgtcttcaggatggaatgcaggtccgcaggtttggaggcaagtgccttttccactctcacctgccctgcgtatttgaatcagtgtccattgggtgtctctgtgattgccaaacacatgaacatttgtggtttcacctcagtagcctgctaaagactccggatttgcttatgaaggacttgtccttagttggatttaccagccattggtcttctgtgtacacgtagtgcaggatttccttggtgtgttagtagaggagatggtgtcctgggagaattgaatgagtcatttagttgcctgctttgtgcctttagactaagtgttttgaaatctgataccagtctgataccagtatcttcccacacagctttgagagcttgccatattgtttattgagtgaaataatgaagcaaaagctattaagtttatctaaaaaacattttatatctagttatagttaacaattttaattatttttatatcttatatatttatataacatatatatttgatatctattttataatgttttatgaccgcttaagttatttttctattgctttaaagagacaccatgaacaaggcaacttacagaagaaagagtttatcaggaatttacagtttcagagaattgagaattcattactaccatatctgtgagcatagcagaaggcagacaggcacgttgctatataagtagctgagcacttatatcttaactgcaagtagaagagaggacaggagagacaacactgtctggggatggcatgggcttttggaacttgaaagactacccacagtgacatatgtccttcagcaaggctacccctcctggcccttctcagacagttccagttggaatatctgttccccagatgttccaacctgtgagcctgtgggcgccattctcattcaaaccagcacattaactgagtgatgtgtagatacatcaacatttttaccattttgtagataaagaaactaaaccctaggttaggtttattctgtgccagtcacttagagtttgattttcttggttggttgttaacaccttctctgtggtgttaaactgaagatttatgttgactgcattaaagtaaaactgggcaccgtttccttttgtgcaggagaaagacttgtggttgagaactttctaagaaagctgctgatttcttagatgctggacaaatggtccattaatatttaacactgccttcactgcccttaaataacctaaagtttgtcctagaaataatggagaacatttgctttatgaccagaccctgataataagataactgttgatggtgcagcacatttgtgacagagagagatttgtaatccgggtcaccagccattccagactacagtgatctgttccagaactgttgatacctcacctctcttttgggattttcttacactgtagccatattagcatagcactgtctctcctgttggtttcccccaatttgaaagctggaaataaagtgggatgagaaaactgagatttgcatataaacctaattaggaaaattcatcaaacacttcactaattttagtctcctaaaggagataaaatttccagaggagataaaattggacaaatatgtatcatctctttaagtcgtgttgcagatgcatttgtgcccggagttagggaacaagccttagctggagtgtaaagtgcatctagagtagcagatgtaccatgaaacgcttctgggttagtctgaagtcctctttccttcctgggagagggggaaatagctcagcttcccttagctgacccagccacaggacaggaggggtggggtcggtgcttcatgtagctgacatctggtgttagcatcatcacctgggtgaccctgcacatacttggaaacttgtttttagttctagagcagtgatgactaatttaggatataatacttggtgtgagtcataattgagtctcggttttcattgttttctgaaataaactcatttgaagaatacgtagtcaggaatatcattcttaactacctctcttgtgtcttttttttttttttttctgtgtgtgtgtctttattttttaacagcttgtagattgttaaaagcaaaactccccatttagagcaaacctcaaatttaatatctcatacttttctgtcaatgggacccatgtaattgtaggttgttcacaccatgctttaacttcatcaaatattatgatggaagaataataacaattttggactgattctgaataaattgtttatttctagaaatactgatttgggtcatttgaaaccttggttataaattccacttactagggcttttgagatgattgattcatcaggcaaaatgtacttgatgccgagcatttggagtgttctctgattcccactcccacaccacaccctgagatcacatactcattctaaaacaataagttgcacagactaaaaggaagtttccttcttaatttttatccacttatttctgtgtttgtttgcatgtgtgcagtcatagcgctgaggcatttgctaaccaaagcaggtatttcctttgctccattgctatagcctgatctcgagcttcagacaaaagctagctcaggctcttagttttaatggtcttgggtattgctaaaaaagctacatgtcctatatctgtgtcagtctcttaaattagaattctgggccacaccctcagcatgccactgaatggcagtgctgggttgctatgatactgtgtttagtatataattttttagcatgaatcctatatgcgatgttagtttagatttcaattaaaagagcagcagcgactgggaattggttaataaactatctcattacaaattacgcctgccctttcgagtatttgttattaaacacaacagtaatgaatgaaaaacttgaaatgattgtacctgggcttctcacactgactctgaagaaaatggcgaagaacggggctggagagatgcctcagaggttaggagcactgactgttcttccagaggtcctgagttcaattcccagcaaccacatggtggctcacaatcatccattatgagatctggtgccctctgctggtgtgcagatatacatgggagcagaatgtcgtatacatattaaataaataaaatccaaaaaaaaaaaaaaaagaaaaagaaaaagaaaaaaaatggcgaagaagaggaagagaactttaaaataggctgttcaagtatcagtgttccctttccactggcagcagccatcaggtgggccgagatgggtgcgtacaaacacttccagcagctgtgggagaagctgcagtatgatgggatgcactttgttctgaggggccaccgctggctataccgccagctctctgtgctacacaggactcacttacccacacacccagccggataaagcttgtaggctgggatacagaaccacacaaggttatgtcatgtataggatgcgtccagctccctcagtctgttgctgaggagagagctggacaccactctgggggatttgagagttctgaattcctactaggctggtgaagattccacacaaggattctttagggtgtcctcattggtctatcccataaagaaggaaccgtctggctggaaaagtacagcctatgttcttcattttaaaacattagatctatttgttttactttgtatgtgaatgtttggcctgtgtctatgtgtgtactatgtgtgtttggttaaaagagggcattggagtccctggaacaggagtaatggatcgttgtaagtcaccacgtgggtcctggaactcaaacccaggtcctctacgggagcagctatctctctagcccttgttccagttctttgagattggaatatagtcttgatatgtctttcagtttctgatgagtcctgttagtgaatttttcattttgttagacttctcatttactttttgttggtatttttttctctttattggtattctctacttgacagtgtcgtgacacttttcttctttaattgtggttttctttgaataatggctacttgagaatcatactctgttaaatctactgagtactctcacaagcagttacgttacgctttttcctcccctcttgttaacctgtgggctgtacttttgcagacagagagggagaggtagaagtaggaagcgtaggggatggtatgtaaagtatgtattgagtactggcctcagcatctgggttgttagtgcctgggggagatctccccacctcaccactgatacggtgtttccggcctctgatagtgctcctcagagaggtgctgctttggttgtgctcacatcgttcctctgttcccaacagtactcctacctcttacaccccacttttccacctgactgactgctccattgtttttagcaatgctataggactcagttggtttaaaccaatttagtttaggcttcaagggatttataccagtgattgtgttcttatacacgatctgttcttacagatctctcctgacaatgaattggcctgcggctatctggtgtctttggtgaatatagaagtctctaatattcctttctctcatagcccagcagtttctggagcacctgtaaactggaggatccttcgggaaagaagagctaactgtgttaagggtaacttgtgtgcggtggcctaaggtcttttcggtgtgataaagggcaagcgtacagtggttgggggcgtattcttggtggtgttgccccaaagtacagtctctgtggtgtgagtggtgtaagaaaggaaccctcacttctgtgctgcaattggctagagctgagcctctacagcaggatagagtgcccctgtctgtcccttacctgaaggaggccgtcagggagcttgaggtagggaacctctggttctttgagtagtgttcatgccttgccgagcgaagggagcatcttagttcagattctgattcctgaattttcttaagttatttgtggtatagggctcaaatccgaggccttgttcatgagatgggtgtcctcccccccccccacccaccccagctagttccctgagttttcatagatattcttaggtgtttgcttgcccttgggtctattcatagagtctttaaatgtgttttattatcttagaactttatttattttgaaaaaggatcttgctctatagccctgactatcctggatctctatatgtaggcgaggctggccttgaacttttggtgagcttcctgcctctacctgtcaagtgctggaattacagacaagtaccatcacacttggctaaatggttgttttaaactgaactttgtgggaagcagataggtctgaggaattcttactttgtcttgctggaagctgacctctgactttgactacagttttaacttgttttatagtaatagttagtaccttttatctaggatttcatagctttcaggtacaaaattatgctcttttgtttgaaatcttaaaggatatgggaaaattctttgaagtaaaacgctttctaaaaacgacacaagaagaaacaaaaatttcaataggtatgtgtctatttggttgactctgaattaaggaaaaaattactagaaagtaagttacagagcaatgtctccagtaaacataaattgaacagtctttaataaaatattagcaagttgaattctaaaattataggtagaataatatttattgaccatgtaagattcatacaagggttgtaaaactattcatttatttaaaaaatgaccaacaatcatttcttggccttttgcctagtctagtgtaaaacacaactgcgttagttttttacaaagatgtaaagaataaaggttgaagaaaagttcacctcctcaacagtgccagaaactctggatttcatatgtggaagacggcccgacacaggtactgccgtcagctcagggtggatcagaggccttcagttagccaagtcttaactccaaaactgctggaagtaaagcatttcactatacgtcatggcaaggacttcctggaaaggattcaacagcccaggaaatcccaagaattggcaaaattgtaatgacatgaaattaagcttctgcaaagcaaaggagacagtcccagagtgaggagacagctgactggaccgggagaagcgaatcttggccatctgctgtcagaccagagagttgttcaaatagagagctgtaaaagttaatcacagaaatcatcccgtgagtaaatgaattaatagccaaatacatagttcccaatagaagaaagaaaatggccagtagtacttttaaaagtgctctatatccttagccatcaggaaaatgcaaactaaaactgttttgagagcccctctcacccctgccagatgactgtcaagaaaacaaatgacagcaaatgctagcaagactatggggaaaagggcccctattccctgctagggggaggagacttgtgctgcactgtggaaatcagtgtggaaatttcttttttaagattttatttacttattgtgtacacagtcttctgcctgcaggccagcagagggcaccagatctcattccaggtggttgtgagccaccatgtggttgccgggaattgaactcaggacctctggaagaacagtcattgctcttaaccactgagccatctgtccagccctgtgcaagtttcttataactaaaaatagaactaccctatgacccatctattccagtgttggtgtacgcacaggactattaaatcagcatatcatagagaatttgcacacccctgtctgctgtggctacgctgttcataatagtcaaaacaatgaaaccagctcagatgtctatcaaacagaatgtagtaggtacacccagaattttattcaccttgagttggggttctctagaggtgtagagctgatagaatgaatctatatttaaagggaatttattagagtggcttataggctgtgattcagttagtccaacaatggtggtctcttgaaggaaaggccaagcatctggagttgttcaggccacaaggcttggtttttagctcgtgttggagtcccaaagaagtaagtttgaaactaaccaaggaatgcctcagcagaataaatgaacttgccagccagagtgagggcaaacaggcaaaaagcaaaagcttccttcttccatgtctttttatgcacattgttacctgaggggtggcctagatgtagggtggtcttccgacatcaaatgatccagtcaagaaaaaaccttcaatggtgtgccatctccttacctgggttttaattgattcaagttgacagccaagattagccatgaggagaacatgagtgaagccaagcatgcacaggagaataaatgggactggaaagcattaagaggaacaagccagtgtcagaaaaccagtaaccacttgttctctcttatgcagagaacacagagagaaaggggtggagctggaagagatgagtgtgtggggtaaactgagggcaatcagataggtgttgggtacatggaacagtgaagtacaagaggcagctcttgcctccttaactgtccagagcagcggttcccaaccttcctaaagccgtgcccctttactacagttctcttggtgcggtggaccccccccaagttattttcatcactacctcataactaattttgctactgctgtgaattgtaatgtaaatatctgtttttgatgatgttaggtgacccctgtgaaccggtcattcagccccaaagggattttgacccacaggcctctgagaacctctggtctagatgaatgtttaggttctttaggtcagcttttcaggttctcaaaacattgtgccaagattttgatccaaattaaattatttgagtagactcattgatgaagatactgaatatgttgtaatctatctccatttatttgatgacagtgttaggacctctctctctctctctctctctctctctctctctctctctctctctctctctctctctcttttttcttttggctttttgagacagtgcctctctacatagccctggctatcctggaactcactatgtagcacagactggcctcaagttcacagagatcagcctgcttctgacttctgagtgctgggaccaaaaggtgtgcaccacgcccagctgtgtcttgattttctttacaaaggtcttgcttgtcttttgttacctcttagatttcctttctgttgaaacctgattgccatatatgaggacgcttagaccacggagttaggtcacaccacagtttagagctaactggcctgcctcaggatgcacctttgtggggacattgggtgctccgtggatagcaccgttccctttgtatcgtgactaatttccttcatcactaggcctgcccagtgtgggatcttgtagggatgaagtctcgtgtctcatacatgtagtagtaggtgctctgcgtctgcactccagccgctgatactgtagtgttgttttacatatcgtaggatgatgtggggagcacttcttgctttacaactgaggacctatccacagtgcaataatataacgctgttacacgcaggaccctctgattggttcacttgcataactctagttgtgacccatcagcacgatactcctacccagttggttccattccatagtttgaaaaacagtactggcactctcgggaggcagaggccagtggatctctgtgagtttgagaccagctggtctacaagagctagtttcaggacaggctccaaagccacagggaaaccctgtctcgaaaaaaaacttaaaaaagaaaagaaagaaaaatagcactgtaggacaatatttcttacagtatgagctaggtacatcttcaggttgggtgtgaaaagttcagggagcatgtaacagggctttggggagttgttgacagtatgctaatgaatccccaaagaggaaacctcttttcctcagagctgtctctttcctacctgcttgtcacagtgacttttatttttaacagtcttttgtgaaatatagttttagtcataataaaatggaaaagttacatgcattttaaaaactcatattctggctggggatggtgtggtgcatcctttaattccagaacttaagagccagagggaggtatctctgagttctaggacagccagagctatacagaaaagttttgaaaaaaaaaaaaaggcgggctggagagctggctctccagaggttaagagcattgactgctcttccagaggtcctgagttcaagtcccagcaaccacatggtggctcacagccatctgtgatgagatctggtgcccccttctggtgtgcaggcgaacatagatgcagaattctatatacataattaataaatatttttttttaaaaaggccttagttctgaggatgttactgaaaaatagtacagttgggtagtgcagaccattatgtaatatacttccctgaacaacattaaaaaccttaaggcattgaaattgttaaatgtgctgtacatatagtagttctcaattgctcattggtaaatacttggggagatcaagtatttattaggaaactctcctcgtctctgtgacagaaatacctgacagaaaccattcaagggaggaagtgttagttgtggctcatggttccagagagtggcagtctgtcagccaggatggcacagccttgggagcacctggctgcagatgctcatttgcatcaggtcaggcaggaagcagagaatacaggccagagccacaagtgctaaaactttgaaaagcccagccctagtcacctacctctgccatctaggccccagattccaaaggctccacagccccagaaacaacaccagcagctatggaccacatgagcctgagggggggggacagttgagactcaagcctgttgttttaaatattcttcctttatacagtcacgttcatttatatgttttcaaagagattactatccatcagtgtgtttgttttctgattgcattgacaaaagatacctgataaaggaggaagttgttttattatttatgtaagctgtatgctcttgggcagaacattattgtggcagaagtggcataaccctagtgatccatttcttccaggtagacccacctgactggcaaccaagggttcaccttgtgggtgaacaaaactctaagtagcttaggataattaaattcggaatgactgagcaaatgggaatagtctgtatcttaggatatgagtgatacgaatacttgaggtttcatgaagctgcccagcatcacgagagggtcttgtaccatgtgtctccagcgttggggaagggattggaattgaaatcagtttcttctgaatgcaaaccattttcctaccactttcttactgtattgtagcatcaaggcatgggtttactgttgatgttgagaaaggtcgcaatgtgtaaccaggctggcccctcactcttagaaattctcctgcctctgtctccaggattaaatgagtgagccactatgcctggctaaggttttgaatggtttcacatgtgagagtggagaggtgagctaccaggactcgctgagagagatgatgatgtgtaaaagtgggtacagctggaagttgtgttcatgtcagcgccgaggaggagaaaaagctcaggaaatgttttaagactgttagaactgcgtcagcctctgaaggtgccgtctgtcatcttcagaccattgtaatgggatctaattacattaaagatgcaataccagggcgggaacgttgctcagtagtaggactcttgcctagcgtgggtgatgtttgtgttcagttcccagtcccacaaacacacaagagactaagttgtaatacagatacattgtctactttagaaaagataaatctgtatttgaatgatatgggtgtgtttgaaaagtgagtaactgagagaactatggggatttttctgtgagttgagaaagggttcttagaaatgatttcatcttctcaagtggctatctgtaatacgtattccggaaagcttaccattgttagtttacagaatcttgtggctttctaaactaatgaacttggtaccagtgctaggaaatgtcatttgttaatgaaatacgaaccattcgactttaagagccaaaaactccaaaagatttaagaaaaaggccattcagatgcggttgacttagtggagatggatcaggttctgaacatgtggtgttacaggctcagtgaaagatccagactcaaaaaacaaggaagaacttgattgagaaaggcatgtgaggtcaacctttggcccctacatgtactctcaaacacacacatacacacccacacatggggacatacagtgtagatacctgtggtgatattttaatgtttttgaagatctttttcatacctttatataaaacaggtgctggttttggttggaaaaatgttatatgttatgaaactaaatatcaggttttatgtatatgatcttggaaatgtaatctcagtagttcaagagacttaggtaagctactggaaggttcctgttgacagatttgaaggtctagagtttaaaggttgtaattttttatgctaagaacaaaaaaacgtaatatatttgttaggattgatgtaaagtaccttgtttctgtaacaagcaaaaggcagatatctattacgtgcttttatgggccaggctctatgctgggcattagaggggagaagggaacagtaggcgtgaggtaacacttggctcctgctctgggggacatcgtagattaggataattgaaaataacagatacaattgccatatgatacagaaagtactgcagcagagatacaggcctaaaatacttgagaagaggtggattaacccgcctgtttagtttcagttctattaggaaaatccttatgaaggacttaggccaaaatggaaccagggggtggagtctccaagacagtaatgtggggagatgggcattctgagaaaagagcatgtgctcccaggagcctccaggcctgtggtttcactggggtggtgaggcatggtgatttgggataggcagctgctctttgatacaatacagaggatcttacaatagtattgattctttttaactttcaagcagcttagataataatcagaaatgagtaattagttacgaaaactatcatgttctgactgaaatctaggtgtggggtgatgagcatctaaagtatttgaggtgatcccaagaaaggtgtgtgtgaatcagtaatattcagtgattggttgtgggcagcaagaactgccagtgtaaatccccacatgataggattatagatgcataaatttacctcaatcacttagaggactgtgcgatgcaaataccttctacaaagttaaatttaaaaaacacaaaagtcatgttaaggttgatttattcagagcctttcccttttctgtttatagatgttacttcaaatgaacaacaagagcttttctgccagaagctacagcagtgctgtgtactgtttgatttcatggactctgtttcagacttgaagagcaaagaaattaaaagagcaacgttgaatgaactggttgagtatgtttcaactaatcgtggtgtaattgttgaatcagcgtattctgatatagtaaaaatggtaagcctctagatttctacccctcagagtatgtaagctcaaggatctgaggtgtatgtacagtaactatcgcacccagaaggatgttctcagaaaccccattgggtttggtgtggtggtgcacgccattaatcccagcacttggaaggcagaggcaggtgggtctctgagttccaggacagcctggtctacagagcgagtgccaggacagccagggctgcacagtgagattctgtttcaaaggaaaaagcccatttgaaatgttatccattccttggtgtggccattgattatagaagtcagagagattagtagttccagtgctcttggacaccatattggatagttcagttcttgaacttagatgtaggttcaagaataaagttcttgctgggtgttggtggtgcactcctttaatcccagctctcgggaggcagaggcaggcggatctcgaggctagcctggtctccagagcaagtgccaggataggctccaaagctacacagagaaaccctgtctcgaaaaaaaaaaaaaaaaaagttcttgtataggactactagagttcggttcccaacacccatatctgcagttactatttgtatgtaactccatctccaggagggtgcttctggcctctggcatctgcactgaggtatacatatctgcaaatgcacacatgcttgtaactaaaactaatatctttaaaatatatatactcgtttatccagatgacagatgatgtctgagcagtggctaagggagtcaggattagaagaaattctatataggacgttttcatgtttttgtagattataacattttgatgatcacccacaaacctttaaagagttaaataggcatctcagagtggaagtcagaaacctgaagcacaggcttgaacactggtgtgattccctaagtgggaaaccaaccatcaaatccacacaagtgaaataaaagtactggctgtggtttcctttactttatgtgtataaggcactcttgaaacaaatgaacttcatgcttagatgccatgggttcctcattataggcagatacagttgagtaagccaaaatccaggactcgtcttgctccaggcattttagggaaggaatactcagctcagtagataaattgtggaatctctcatgtttgtcttttttgttttttaaggttgatgctattagtagtttaataatgcttgaacctccttcagcagtggaaattgtttcagggtttgtaactggcttttgtcccatactaatgaaatgtaaaacttgtggggacataatttaaactgcatcagacagaagaacaacctaatacgtgttctgggagaaaaataaaataggtagtagaaaagacagacttggctttaataaactagctgggctttctttttatcacagttgaagtcctgtcaaaggaacttaggaattggtgttatatttttaagaacagaaattaatgctttagtgttttttgttttgttttgttttttaagattggctatagaaagaacattaaccagaataaaactagcttcctaaactcccattgctagtaaaggggtatgtaagtattgatgaactttctatttttatgtatttacttgtttggttggttgactggttttttcgtttgttttttgggacaggatttctcatttctcagtgtagcacactggctggctgtctttgaactcacaaacatccacctgcttctgcctcccaagtgctgggattaaaggtgtgcaccaccatgcctggctgaacttcctattttattttgttattaaaaaattcaagagtaaaggttatttttcttctgttaactgatttcaagtggtttttattgaggaatcgtgaaattccaatggaagatactttataaagttgagagacactaaaaatactcaaatatttgtcagattgtccataattttctgtatattatcctgggatttactctctgacctcaagtgaaaagacatgtacatttcattgtttttgttgtctaattctggtgctagtttctaggtaagagttgggccacctgatcatcaaccgtggccctttaacatgttcctgagtatttgttacaggttattttattggtggcttcaggttaacttttgattttactgatgacagtcatgtgacttcctgctatttgtgaaattgatgcccatcagactattagtggtttacctttaaatttggttttgagagctgggtgtggtggctcatgactttaatcccaacactcaggaggcagaggcaggtgatctctgagtttgaggccagcctggtctaaagagagagtgccaggtcagccacggccacacagagaaactctgtctccagtaaaataaacaacaaaaaatggttttgagttgtaacttgggaagttctagatagttgccacctggctgttaggttatggtaatggtgcagacaggtatttgactgtcctgggtgctgctttataagaatagttggagagttacctgtacattgcttgggttaccctcttgccccaggtggtttacttcaaatagtcctcccttcaactatagtcctcccctcactgtaggcctcccctttgttatcattattatcatcatcactattttggttttttgagacagggtttctccttgtaaccgctttagctgtcctagaccaggctggccttgaagtcacagagatccaccagtctctgcctcctgcgttctggaatgaaaggcgtgcaccaccattgcccatttaactctctcattgtaatcatatcctgtcaccatagttacacctgccacactgcagtcattccctcactgtatagtctgtccacactgtagttatatcctgacactgtagtcatccccacattagctctgtcttaaatggttactaaactgaggtctattcttctttcttaaaagaaatgaggctggatgtggtggagcacacctttaatcccagcactcaggagacagaggcaggcagatctctgtgagtttgaggccagcctggtctacagagcaagttccaaaaacaaaaagaattgtgggctggaaccacagtgtagtcgttgctggagaaaaaggacgtgtgtggttccctaggtcctggcgatactgaggagacaaaggagggaattttaaatactatatttcactgactctaaaatgaatcacagagcacttccttgttttagagtagtttgtgtttttaaagtctcaaatctcaaaagtattaaaatacagagagttaaactgtcattcaggttttataactgtaatagcagggagggtgttcctgttataggtacagaacatggctgggatagaatatggaaggagttgtagattgatccagaatgttttgtttttcactgttaaaaattcagttatacagcaaagaacatgaatccaaatttaatttcttccagattagtgctaatatcttccgtacgcttcctccaagtgataatccagattttgatccagaagaggacgaacccacactggaggcctcttggcctcacatacaggtatgggctacatgtttctgttaataatgtttacattcaatattctgctggtttatttaaaatacttgacttttaaaatgtccatgttgtcatggcctgcagtgttagcccctgggaggcttgagacaggaagatcattcgttcaagaccaacttgaacctcgtagtaagaacctgtctccaaaaactaaaaatgtgggtgttgcagtgggtgagggtgcacacatgctgtcaagcctgctgactgggtgcagtcctagagcccacatggtggaatgagagaacagacccctgccaggtgtgctctaacctcgagatggaaggtgtgacgtgcacccctccccccccaaaaaacatgttacatttttaaaataccaaaataatttagtttgaatacatttcttaacattattttgttttctataagtaatgttttgtgacaggctttctgtgtagccctggctggagtggaactcactgtgtagaccaggcttacctggaactcacagagatctgcctgctgagtggtgggattaaaggcatgccactgtgcctagctaaaagtaatttttttcattgtcataaaatacacctatgttaagataaaatgttacttagagacattttcagttcatcccgagtactgtgctagtgctgttgctgtctgggtccagagcgttcctcagcacaggtggacccagtatcctcatcagtagtcagctctctgtgtcacatcttcatagctcatagcaaacattaaaacaaattctgttttctgccagaagatacacttaacctagttggatatttcatatacacagaatcatcatgtgtggcttttcatgtctggattcttttacttagtatagtattttcaaggtttatctatgttgtagcataagtcactgctatttatttatttacttatttattatgtacacagtgttctgtctgcttgtatgcttgcatgccagaagagggcattagatcttattatagatggttgtgaaccaccatgtggttgctgggaattgaactcaggacctctggaaagtgcagccagtgctcttaacctctgagccatctctccagacccaagtcactgctttttatggctgaataatactcaagtttatggatgtatagtttgtaaaaatccatttatcagttattagatgttaaagttcttttacttttttggctgtgtcttagttagggtttctattgctgtgaagagacaccatgaccatggcaactcttataagggaaaacgcttaattgaggtgatggcttagcgtttcagaggttcagtccattgtcgtcatggtgggacatggcggtatgtatgcaggagacatggtgctagagagatagctgagagttctgtatcttgcaggcaacaggaagtagactctgtcacactgagcatagcttgagagacctctaagcttgtccccacagtgacacacttcctccaacaaggccacacccactctaacaaagccacacctcctaagagtgccactcccttaggagcttatggggaccaattacatttcaaactaccacaggctgttgttacaactagggctgctaatacattcatatctaagttttatttaagcacttacttcctgtaagatatgatgtttgttttttatccatttaaaatattttctaatttcccacatgattttatttcactgtttagagaatatgcattgtatgatcttagttcttacagagttagttgatggcagtgtacaatatatcctagagaacattgtgtgtttatacttgtcaagggtgtgtgtgctgctgggcctagttggtttataatgtcaggtctgttaccttactgatctgttgtgtttattgaaagaaaggtaatgaatctctacatgttaaattgtcttggcatttctgagtttttgctttgtgtgttttgggacctggttgacaggtgcatataagcttatgtttgtaactgcatctttcttgtgggtggaccttatcatttgtccatattttgaagttaggttgtctgatgttgtatagccgttccaactttaagctactgtttacatgacttatattctccatcctttttgttttaacctctttgtctttgactctaaagtgtgtctcttacaatagcatttagttggaggtgctatatatctgctgctgttttgaggtaagtttctctcttacgttccttctggcctggaacttacagagatctgcctgcttctgccttccatacctggctcctaaattattttttagtagaattgagcacaagttcatctggaattttctgccatacttggtataaatttagtaatggagggtttttaaagcatgaaattctcattagctggtgttactcttttttattatgtatagtttatagagtctttggaagagacttttagtttttgaaattttaaaagcaaagacagattttccatcaggatattttttatggactcatagaaattaacacaagaaattcagccaagtaaacaatgtgtttccatttttcactggtataatttgaggctccatttaaattccctgagagaaaatagttaacattttagaagatggtaattgttctcaagatactatttctatgactggtaactttctgtgctttcacttagcagagcagatgggacgggcatggtgactcccacctttaatcccagcactcttgagttcgaggccagcctagtctacagataagatatgtagagtagctctggggacagcttcatttcacagaagcatggtctactgtgacattttgaagactgtcagctctgtaggccagttgtttctcccacctgtgtgtgctttaaataaccgttttcatctcctcggtactgctaagtcagcgccaaacagcagtcacttcatgtgcagtgttgtcagggattagaaagtaggggtctggaaagatggctcagcagttaagagtggacactggctgcctaggtttgagccgcagcacagacatcacaactgacagctgtctgtaactccagttccagggagatgtgatgccctctcctgacctcttgagcactacataccatggtacacagacagacctggctagagagatgcctcagtggttaagagcattgctgttcttccataggacccaggatcaattcccagcacccacatggcagctcacaactgtctgtggctccaatgccctcatacagacatgcaggcgaaatacccacacacataaaacaatgatacgattaagaaagaagccatatacaacttatgaacagcatagtgtccaacagtatattggtttaggaatctggggcttgatgtcatgtacgtctcctgagggatacgctctttccctgaaaagttatttggtggagtgcttaagcaagtgggtggttgggatctgcgtaccctgccctgcgtcatccccatctcgacacacacattgacactattataaaagccctctgcctatattctccagatcaaagtgaatctgaagctcaagctgcatatcttccaccagtagggccgtctgtcagatgttcccctcagtcagtctgtgcctggtaacttttgtgtgttcctcttagctttttgctcacctgactactcaggttagttggatgagcttcttgaactgcacagtgcttattcttgctcacactgtttgtagcccacccagtgcccagtatgaaaacaggtaccaaacaacctgtactgtcagcaaagctcaacagtttaatttgtcacatcatccaggctgtgttttagcatgtttgtgctccaaagcaaaatttattatggggttttgtttgtttttcaatgcagggtttctctgtgtcagcctggatgtcctggaactcagtccatagaccaggctgggcttgaactcacagagatccatttgtctctgactcctgagtgcttgcgctaccacccagctatgattaaaaataagagactctagccacactttctccatatgctgctgtaattttgacttgcagtcacagtgctgtcaaaagtgcaggtcacatggtgcttcttggtatcaggctcgcccacctgtcggctttatttgctctgctgtacagaccttcctctctcaggctctggcttgtacagtttggtctgttctccaagtgtactgctttccattttaatttgctgctctgcttttgtgtgtgtgtgtgtgtgtgtgtgtgtgtgtgtgtgtgtgtgtgtgtaaaacctgtgggagtctagtttttttatttttccaccttctatcacatgggtactcaggtcgcagttgacggcaagcactgttacctgctgaaccatcttgccagatcccctactccagttttataggagacgtgatttttaaaaccggtatgagcacactgcctactcatcgtgagcctgtgattaggcgaccctaggggtgaagttgaggtagtctggtagtatgggggaaggaaccctgataccttagggtcactctgactgatgagtgatgcacagtgatgaactgcggctgaggagaccctgccactgtgatgaccactccatgaccgagagtggtctgggagcaggggagagtcccctggcctacaggttcacagcagtctaccaaggactggagatgggaactgagcagaaaccatagacaccgattactggtttgctttctgacacatcccaggaccatctgcctgtgggagcctgagccctcccacagtaatccaatggaggcatttttatggattgacttccccttcccagataactgtggcttgtctcaagttgaaaaaagccaatcaggacaaaaaccaaactataaaaggtgtttttttttgttgttgttgtttttttttttttagaaacaattgccaactcaagctgatcagagaggtgtgtttttactaaagtgttattcagggtatgattttataggcattattttgcttttattttactttcctacacagctggtatatgaattcttcttgagattcttggagagccctgacttccagcccagcattgcaaagcgatacattgatcagaagtttgtacaacaggtaagggactcctagatctcagatcttcctgtcctagcacttgctttttaagacgagtccctcaaaacataagtaacttaaaagtattagtaattgttcttgacaaacaaaataagagcagcttgaggggttggcaagatgactcgggtcaaagcccctcctgcttttccagaggctctgtgttcaagtctcggcatccacacagggcccctcacaaaagcctgctaactccagtctcaggggagcaggtggtcttctgacctgcacaggtcacactttttttttttaagtagctttcagaaattaagagttttgtatcaagagtgagcacccaatgaaatcaaactgccctttctgcagtttctcaaaagtttggggtgaccatttcatctaagggtgtttaacttctgtgttaaacacctgtgacttcgagctgacagggagggatgatctgagtgcctttctgggtacccagcatcagtcgcctgtcattcctgtcctagcgccacaggggaaataaaatgggaccagtaaagagaggaatgacttcttggtttttagaaactggtattaactctaattccagaacttacatgcaattaatttctgagaatgtgtccatttgtttttatggtcaagagcttttaagacagttttatagccttttaatcactgaaattgtctgcccctaaacagaactgtaaagtaacccaaaccgtttctctatccattttctcttttaaagccattatcagttaggaatttgatgctgagggcacatttgaactctgttatgaggacctttcagagcactgtcaggtgttctggatgttagagtccacatattcagaactgtcccttcataaattacacaagattatgtgttctttaacagtacaatatacacttcaggcatgaataaaatcagccaaattaaagtggggtctttggggctattgaagaggaaggcacatttattttcttgtatgtttctcacgcactcagcacctagggaagccacacacattaaataacagcctggtgctctgggcactcagaaagctgggcttttctggggtgtgagggggaaccatttctacctctaccccaaactctgtgggaagccaagacaataatcttactctgacaggtctgtgtgctgcctacagttgcctctgggggattgggggctgcgtctgtaaactgctctaggaaaattctcagcttttgaaagtttgaaaactcagaatgggaggcaggacgctgcataatttaaatttgttcaaatcagagaatctccaaagaaaactaagatgtattcatggtttttttgtgacatggaacctatcatttgaatatgtcaagcttgttgtaaagaaagcccatatccagtgccacacagctagtaaatggcagagtctggatttgaactagagcagtggttttcaaccttcctaatgctgcgacagtttaatacagttccccaggttgtgctgactcccaaccataaaatgatttcactgctgctactattatgaataacgtaactatttagtatgtagtacatctgctaggagacctcaagggtgtcacgacccatgcgtcgagaattgctgaactagaccctccgagcttgatgaattactcttaatagtttgagggcaacagagccagaaaaagcgggtttcctgatatgaatatgacatttctaattggatttatttagttataagagtctagctaacaagcaccctcaaacttagtatttcccttagagatcaatctattttgaacaaaatcatctttcaagtaaaccaacatcagaaacaggaggttaaggttaaaatgagaagtttaggcatttttaactataataacttggatcagtgcttctgttccataggtatttcttgctgtagcctcatgcagtactgtaatctagccaaaaatgagtgcaaaccacaagcaagtcatttgtgtagggcacgtgagtgtgacttaccgctacctcagaaattctacttgggtttgaaatctccacataattaagacaaaatggagtcagagcatctggtgagagcttgtcacctgtcttgtaaaacccagcatcacagttcagaatgtaaggttccatgcagtttgatagaccatgtgtctttgcatatgggcttgctatttgagacagtctaaccactgtgtaggtcaggctggcctcccaggatgagtacttgggaggtaaaggcagaaggattacaagttcaactagcctggccacataatgggtcgctgtctcaaaaaacatttttaaacatctctcaaattttcacactaaaaattaggttaggaaagaattttaaagtcactggcaaggttaaaaaaaatcttatttttatattctttaaaatgacataaagactgtataaagatgaatttactgaaaatattcatgcttgttttggttacttggcagaatatttagaaaaatgttaaatatttcattggttataaaaaatagcagttttagctcgattatttttttaaagtaatttgtcagattttttttcaagctcctggagctttttgatagtgaagatcccagagagcgcgacttcctgaagacagtcctgcatcggatttatgggaagttcctggggctgagagcgttcatcaggaagcagattaacaacatcttcctcaggtaagctcgccatggagcgcattcgccccccccacccccgcccgcccctgagtcttcctttaactaagcgcctgacctagctggtggtgtctcagtcattcctacccgttttgtggttctcacttgggacagcttcacattttgaagcaatgccacctccttttctaggttggcagtgataatgaggacagtgtttgctatgaagtcaacacctgtagaagtgctttttttctgacaaagctaattaaaatccatatgggactgtggtttaaacacttgtgaaacatttgcatgaatgcctgtgtttcaggtttattctccttgtctctattaattgaagacaagaattaggcaagtgttggagatgagtggtgcccccctcccatgtcagggttccatccagtcatctactgtagcccttcgtgctggcatttgctttcaaggcaggcctgataatagaaaactggatagcctatgtcatttacaatctaggaaaattctgaaagttgaaagtttttcctgggatagtcatgtgagtagtagttacctaatttgagaaggtctctttgagcattccttccttacatatggagtaaaatataacaatcctgaggaaaggagattgttattctcaagtggcaaattttaggtgtatgtgactcgaggaaatacatcaaaaagtcaagattagctacacatagcaagcttgaagacagtttgggatgcttgagaccccgtctcataaaagagagagagagtggtgtgaacaaaatgcctaagggctgaacagttccagagaaacctgtcactgcttctgacgttggcttggtttcttcactgtgtttacattttattatatctgcctttatttcaaattcaggtttatatatgaaacagaacatttcaatggtgtggctgaactccttgagatattaggaaggtaggtatgggggtgtttgtttgttttaagagactggcaatcccaggctctactttcttttttattatttagattttatttatttattatgtatatagtcttctgcctgcatgccagcagagggtaccaaatctcattcaaggttgttgtgagccaccatgtggttgctgggaattgaactctggacctctggaagaacagtcagtgctcttaaccgctgagccatctctccagccccctgggtttttgttttttttgttttttttgttttttttttaagaattaagttactacatgttttatgtactaaacagctggagttggggggaaaaaaaacaaatgcccatatttttagagtttagagcacaatgctagaggtcctgggttcaacccccaacaacagagcataagacagttttagggccttggcatatcaagtactgccttctccctttggagctgtggtgcgtatgccacagatattttcaggctccagctagaaaggtatggaaattgtcatttcatcaaacattcacgagaactgctgatggaaaagaacggctagattaggaagaacctttagtctttggttttataacacatttcctttctgtttactacacagaatgatagaatccattccaggttattcaaaactgtaggagaaactccccacttggaacatgttggaattctatagcaggctctctcttcctgctttttggaggaaaaataaatgaaggcatgcagagttcagatgacaggctacacactgccccgtaggagcagagcccagccgccgcctgccttccactcccgcacagacagtgacaacttaacccttcccctgccttttctccctccagtatcatcaatggctttgcattgccgctgaaagcagaacataagcaatttctaatgaaggttcttattcctatgcatactgcaaaaggactggctttgtttcatgctcaggtaagattcacaagtgtggcaagtgaaatcagtagttaataataaaggcaaagaatttgagaaatactaagatactagtgttgtgtcttaacttgggaattttatgagtttatttactactagtacagttgtaagtagacatagaaggccgtggtggtgcacacacttttaatcccagcacttgggaggctgaggccagcctggtctacacacagaaaccttgtctcaaaaaacaaacaagacatataagtttgcttatactcaggtccaggacctaaactaaaactactttgttgcatgaccctgaatgaatcttatgcatcaaaccctaaggacctgttagaaaggtcttggttgctgctaatcttagaccagtggttctcaacctcctaacactcccacccttcctttaatgcatagcctcaagttgtgctgacacaatgatttgcattgctgctgtaacaaattgtaacatctggtatgcaacccccaaaggggtcatgacctacagattgagaaccactgtcttagaggatatctgcatatttcatattcacagataagcactggaatactaagtgggtattgtaaagttaaccaagtctagagctgacaatttgttgaatttagaacttaaagatcaaaagtttaaattatgaatatattcatctcaactacaactaaaaactgaagtgccattttgtgaaaatgttctgtatccctcaatgtcacttcaccgatatctcttaaacttgtctctgcccttcagctggcgtactgtgtcgtgcagttcctggagaaagacaccacactgacagagcctgtaagtgtccagtccctgctcatgcacttggtctgtcacatagtagggacagcttcagggaggcagggaagggagcatgctcacaaggaattgagtggacggatagttaaaggtgtgtggcaagatgtagagactgcagtgaactggaatcccagaaccatcccttgagcgtatgttcagaagtaaaacactgactgttccctcatcttttgcagcctgattgcagattgaaaatgattgagttaggttgaggacagaagcataatgaacttcggcactggcatatctgtatatattacctagactggcttccagctccctatggttcttctgtctcagcgccctaaataaatgctgggattttgagctccccgattaaacatataaaccattgcaaatacgaatgttccggtagaatgctttctaagcattttaaatacagagactggaggattaaaattcaacaattttaggctaacccaagaggtgcttaaaaatgtctatacatggtattcatctttcacttgaaaagtagttgcagtatcacaactgaaaacaaagtttaaagataaatcagaattagaagttttgtggtacacatgaaacaagcactcaaaactacaagattaagtcatgatggctcacacctagtaaacataaaatataacttaatgtggggtgaataaagaagattaaggagtttttaaggttatataggtgtttgtttttccttttaaccaccctggcatttctagtattaatgcactatcggattagtaaaatttctttaactgtttgttgaaatatatggtccccttttaatatatatggtccccttttaatattttataccttgattttatcagccaagaaataatttgggaaccctggctttcaaaatgtgtactgtataagtttagataatgggaaattgttctttaagattaccttaaagagctaaagcttgagctcaggttgtgtactgtgctggcaacctcctagtggaaggcagagatcagtaatccaaggtcactctctgctacgctatgtcctgaaaacaaaactttcttgtaaaataacctccccccccccatcaggttgcatttcattttctcatgttataattggtcatatgtgttgatctccttccattagaatgtaggtagagactccatctgctcatctgtgtccagtgtcatgtcccaggccctcggtctgtatttatttgttgaattagacaaagtgtgaagccaagtaagaattttcatgaactaatccttcagaatgaggaaataccctgacattagctagtagggaggctagctactccctactgagtagggagtccctactggacaggctgtcctccaagtcctgtaaccccaaggtctgggattacagacttgcatcaccacacctaactgctcagttcatcctaaacttggttgtttcttgtaggtgatcagaggactgctgaaattttggccaaaaacatgcagtcagaaagaggtaggtttttgttttgttttttttttttttcgaaacagggtttctctgtggctttggaggctgtcctggaactagctcatgtagaccaggctggtctcgaactcagagatccacctgcctctgcctctggagtgctgtgattaaaggtgtgcgccagcaatgcccgcaaagaggtaggttttaataaatgcattttagtcagactttgcaatcttaccctggtccagagtgggaggagcagggagacagcacagccctgaacagtgtccacgtcctaacatgaagttgtaccttgtctgtattagcatcatttgttgtaaaatttttaagtttttttttttttttaaatctaggtgatgtttttaggagaaattgaagaaatcttagatgtcattgaaccaacacaattcaaaaaaattgaagagccactttttaagcaaatatccaagtgtgtctccagttctcattttcaggtaacatctcccttctttggtgacatcatgattttgtactgtgctttttccctgtaaattctgacatttctgatatcttttgtaggttgcagaaagagcactgtacttctggaataatgaatatattcttagtttaattgaagagaatattgataaaattctgccaattatgtttgccagtctgtataaaatttccaaagaacactggaatcagtaagtttttgttttaaccatttgaaacctgtgctgcaggctagtgtcacagttttagatattaaagttgtatgtggatgtccctcagcaaatggtcctaccaagtgtggatgagtgcccctgtggaaacagtgtggctgagctgcacctggcctcccccagctaggagctgaagactacagccgtgacatttttgtcttactacccagggtttcagatgagacacacatgaagagaaccagaacattcttagctataaacctcagcataacatgggaaggccgtaagctttggaatcagatcacacaggcacctctggccagagttacatcatctaaggctaatcacgtgctcagctgacaccagcccaattcagagatgaaagcagtgtttcccagctgctggcctctaacccacaactggcttcttttcatcaggaccattgtagcacttgtgtacaacgtgctgaaaaccctgatggagatgaacggcaagctctttgatgatctcactagttcctacaaagccgagagacagaggtacttgagacattgtgtgattcagctgagaaaggtctaccgctttgttgtaggagtgatggtgaatacattaggcattgcaacttgaaagcctctgacagtaaagccgttgcccagtaaagtaatcctggtattttaagtttaagggtgacatgattttcctccactaatggctcgattgtggtttttctgttgatctcatgctgaaccttaagctggtagcatgtacactgtaatttacacaaaccgttttgtccgcactgacttccctcacagtttggcagttccagtgctgtggatactgccacagctctggcttagggtgacagttatctggtgttccatctttaggaacatgccttagtgactaatgcctcatcatacaaggtgggcagtaactattccgtccatcaaggctaccacttgctattttgtttacatagaagagatccagccctcagcagggcatagtgggtcagcctttgatcccaggactctggaagaataggcaggtggatctctgtgactctgaggataggactatatagttgagactctgtcaaacaaagcaacaggtagaaagaggtgaagagagctgtagaaataaaagcccatgtttacgtgtttatagcctgtaccccaagtgaacatcaacttatggttgggttgaagcaccattctataggcatgagaaggggagcagcttctgcttgcccgtccagggcccaagtgttagcgctgacctagaggcactctagtgactatggtgaattaatcccatgtgtggtcatctaggcaagccgacaaaaaatgaggtatcactgtctgccaatgagcgacttccgtgagcttctgattaaaactgttggtttctcctcagagagaaaaagaaggaattggaacgtgaagaattatggaaaaaattagaagagctgaagctgaagaaagctctggaaaaacagaacagtgcttacaccgagcacggtattctcgaatgcaacacaaatgccagctaaagagccactcccaccactgctgggcggacagctccgtacacaaaatcttccaagcaaacctcatcagtataatatagttaggaggccagttttcctggcaaatgtaaagcgaaagaaatctggactaaacatagccctgtgctgttttgtggccacagtacattgtaacctttgtctaaatcatcgactttgtcactttatcatctgttgtgagggggggcgattgtaggagtggcaagaatcacgacctgaactctcattgtgctgcgcgcagatcaggtcatcctctgtgctttctttcacaggactgcaggccttggttacacctgggaaagaactgaggtaaactgaggtgttgtcctccctgagcctctcctagagaggtggtggggtagaagcccagcctctttaaagatactgccatactctgggttttgcaacaccttagttttccaggcttctgaagcccaaagtattaaagctgagggaaagaaaccaaaattctgactgttcccaaatacccccttcagcagcagcgccccagagtgggtggaccctaggctcaccttgccttcattcccctcctctccaaggctggaggcagggccttcccagtcctcgactgcccgaccccaggcctgcctgcagggtggaggctctgagtcccacagtgtgatgcagactgctagctgtcaccacctggctttaggagatgcactgactgtagaagcctggtgtgttcctacctggtcaggtgttttctcccaggtcgttatcagtaccattccagcctcttgcctcgccactgtatggaaactgttttatagcggacgctcttcactggggattgagcaccatttaataaagtctatgtttgtattttgccttatgtcacctgctcttttatatctgggagacagttacagaaaatcacaacttgtggatgtggctaattaaaattaggatgtttgtggtccatggattcgtaatctagccgtttttcaaaaaccccacgcttaatctcaatctacaacagcagcagttctgtgagggactggcagattgtaatgtggtttcaactaaacattggttaaaaataagcacgggattcttgctgctctgatagcaacctaggcagcctccatgaccctggaaaggccttccactcacacaagctgcttcaatgaggcccatttcattatttaactattaaagtgatgtgccagttaagagtttcgtaaccagggcctcgcatactaaccacacatcctatcacgggggctgtattctcgcccctagacgtgaagccttcagcttgtttttcatgttgatgcgtttatgcttggcatttgtactataatggtattttataaaaaaatttagtccaaaaatctaaattcttatacagctacgaaacagaaaggtagtagggaatatttcattatacaagtttatttctagggattcggccaaaacagtttcttgctgctaaatttggagacaaagatgccttccttatatacatatgagcaagttcccttccggttccccaaggccaaactgtgaatttttttaatgttaccatagtccctctggtcacacaatttggaaaagacagggtttgggtttatgtaagtgcttaaaggccaccctgtcaggtgagtgtctctgtaggacacagtgacatattgagcagcttattcacagtgtggtacgtccagcttaccttccctggaagcagtgatgacatacctcaggggtcagagccatcgtggtccagtccagactcacactaccatagcatgaacaagtccaggattggtgcctgttggtttactgggcattcacactcattccttttgtattagcccaactttatttacctgttaatgaaatcaagatacactaagtaggtataaatctatgctagcgcttccagcaatgaccactgagctcacaccactgtccacacagtccatcagaaatgtaatcgctagtttctagtagcctttaaaagtctcgtgtaaggctgggcgaggcggtgcaggctttttattccaggcaatgccaaagtagcaggaggcctggtctacacagtgagttccactggggggggggggggctacgtttaaaatagtctcatctaggagctgacaagttcttgttatgtaacaacagtggatggtgtaaaagtcatgagaaattttgtatacagggtatacctgtccactttaaaacaaaactaagataaagagggagtcttaacctggagcttaactatttaatggacaaataggaagatgctgccttcaacaaccccctctccaagacactagacagctctgtaaaatgtctgttaataatttaaggatttaaataaggttcaggtttcactgggtgtttgcctgtgggctcagaacagcctccttgtgggccaggtttgaccgtccagtttgaaagactgtccttccctgcaaggtcctttcaagtgagcacaggattgctggtggctgggtgtgtcgatgggaggacaaggcttccgtcaggtgagagcgctgtgacacggcttcagcttatgtggtttgttgcctggcctcttctttttaggtatcgtttcctgattttgatcatccacttcacactcagtttggcaaactcggctgctttaaataatgcaaggaaagccccacagaggagtgcgatggtgttccaaggattggccgtgattatctatagaacacaaacaaaaatggggttggttggtttgcattgatgttgactctgtgttctggatgttggagccacagggacatgtgtgttctgttcattcagacttaatgggagctggtcgggagggaactatgagccctgccatataagtaactgagatccttctcagaactgtacaagtaagacacttgggctcagctttaatttagtgacatggtccctacaagtgactcaaatttccctaaagtccttctcatctcagttccctgtttccagcagtgcccccccccccatctgccaccaggcctctgctccttccctccccctgctggggtgttgtcctgtctggacttactaacccttccaactcagcactttctccagccactcagccaaaaacctttctttagcaaaagtagtttatcctacagagccctgtgacagctgtttgctgtctagcaatgatttaaagcaatagctttgtccccattaaaagctgtcttacccccatgaagtgctaacggatggactcggccttgtgcatgatggggaaacatgcttccatggacttcatctccctcaccaaactaaggcagaatttgtacattttggaagtcccacgtgtggcttagaaaaaagcacttgtaagcctggttcagtggagtggtttaagacagggtgagcccctgttctcatacatgcagtgaccgtacctctgccttcaggactgctgtgacacatgactcaagggctttaagggctctacttggaccaaaataagcctctcataacggggtagcttggcttgaagacactggcatacacacttaacacgcacagccatgaactagttcctttcacccgagttgtcttagcctcaagccttcaccccttatacagagtcctgggtgacagcaaaataaatccatttcactgactccatcctgggatctgaagtgtccacatgtgagctttggactctgccgttgctgtgatcacttcaggacgtctgtgataagctgaggaagaccactcttcgcatacttacatcctggaccttctggatgaagggatctttccattcgaagaccacaaagaacaactgagtgtttttctcggcagcaggcctctggtcaatataattaaccacgctggtctaaggtgggacagacagagaattagcccttctggacccgggaagtaagagcttccggaagggactcagccaatggctctcctaacattttctggagaaacaaagtcaagactcttatacaagcccttttcacaggtacaagagccagctggggctttatggttcttggatagagaaaagactgcaatgcctgatagtgttttgaattattaccaatatctgccatcagatgtcaagactcacaattaagccatattcccaattttttttttttttttttttggtttttcgagacaaggtttccctgtggctttggaggctgtcctggaactagctcttgtagaccaggctggtctggaactcacagagatcccctgcctctgcctcctgagtgctgggattaaagtcgtgcaccaccactgcccggctcccaaatttcaaagtacttgggtcttaagagagaagcagtctaacgcttcaagtctttttaaatacttaggcatacatgataagatcaggcaatcaactgtaaagcatcgtgaaacagtggtggaaagaaggctcaaggctcaggccacctctgatctgatgctcacagtggccacaggaagactacgctgaggcttacagcagggctgcccgtgaagtgacgaaggacaccccaagcgtggtgggactggacagtcatcttacaatagcattttgtagtcttgttttcagggtttgtcaccacctaaggtgggaaaactcccgccccttgactaaacctaggtgccagggtcccacatgcacacagaggacacagcaagaagtcacttcagcagaggcaggactaggtggttcttgctcccgaggaagcaagcagatccctttccataccacagccatgccttttctgtcttcccaggatcctcctgcctcaacatccagcatgctcctggctcccagctaagggaccaaaagctttctgacaaaaaggaggcccatctcctcctcctgcatcctaacaggccatcacacccatgctgtgcctggtcccctcatccccccaatccctgtgcccggtcccctcaccccccacaatccctgtgcttggtcccctcaccccccgcaacccgtgcttggtccccctcacccccccaacctctgtgcccggtcccctcaccccccacaatccctgtgcctgtccctcccccccccaacccctgtgcttggtccccctcacccccccaaccctgtgcccggtcccctcacccccacaatccctgtgcttggtcccctcaccccccacaacccgtgcttggtcccctcccccccaacccctgtgccggtccctcacccccccccaacccctgtgcccggtcccctcacccactcaccccccacaacccgtgcttggtcccctcaccccccacaacccgtgcttggtccccttacccccccaacccctgtgcccggtcccctcaccccccccaacccctgtgcccggtcccctcacccactcacccccacaacccttgcttggtcccctcaccccccaaccctgtgcccggtcccctcacccccacaatccctgtgcttggtcccctcaccccccaccccgtgcttggtcccctcaccccccacaatccctgtgcttggccccctcaccccacaacccctgtgcctccctcacccccacaatccctgtgcttggtcccctcacccccacaacccgtgcttggtcccctcacccacaatccctgtgcttggtaccctcaccccccacaacccctgtgcccggtcccctcaccccccacaatccctgtgcttggtcccctcaccccccacaacccgtgcttggtcccctcaccccccacaatccctgtgcttggccccctcacccactcacccaccacaacccctgagcctggtccccctaatccaccacaatccttggcagcatcaggaagtactccccatgtctgaggcgcagagatggttttatggagagcaagcaaactgctgtggactgccttcagcatgtgaagccttcacaagggctactaaagatacactcatcctaggaccccacccaaaagacccttcccctcagagtccccctctaccacaaattcaagtgtggaaatcatgtacggagacagctgctacctcttgccggaactcaacagcttcacgtccgtcctcctctttggtcttcaccagtgacatcttgacccaggtgcggaagcctcccgagaacttccagctggagtaggcactctcacaggcctgcatgaagcccgccttgtctgagcttggggaagagagagggaaagtccaggttaacccaggcctgaccaatggagcccagtgtagcaaaagcaaactgtgtcaatctggtttcttttctggtacaatcaggatgctatgggttccctgctctctctccagaatctggtaggggcaagcaggctataagcagagaaggtgctggcagggagacaatgaggccgggactcagagatccagggtgggaaggaccacagaggcagtaaaggtgcctcctgttcagatggacgtcacctcctgccactgtgacttatcttccaacatcacagaaatggagccgtagcccggcaagggacaggccggagtattcctgttttctactaagtgttttagtccccaagagggcactgaatgttcccctagtgtttgcaaacagcaggagctgtcggtgggcagggatctgcagacacaaggctcctgggccatatagagggcagctccttccagggacaaccaagagtcccctccaggagtgcactgcatgcagagggcaagaactcagcatccacacttggtcaatgtaatgggccgcccggctcttagggtagctcctatcctgagccaggcctgctcccctccggcctccttcaccccaacatttccagcatggacgtgcacaaggcaggagacaggccccatggaccctggacgaccacctgcgcatgaactcctggaaagaggagaagagcaggtagtcgatggcactgaagtcctcgttgctctggctcaggcggaactgcaggaacaccagctcccgcttcctcacgtcctgtggcccctggacaatcagggccgactgctgcggggagacaaaagccagagccttagtgctcggagctgcacacttccccgatgctcacacaagcccacaagcactgcccagcaaaccctcccgcccagggatgcaagctggccagggggacttctcagcacagcgcccagagcccagctgagtgtgacacacattgtcccttttcacaggctgcccacgcagtggaacacctttactgggtaaggttggtgcttgctcttgcctgtttcgtgccaaatagtggtccaagggtgcctgcctaacactctccacccatgggagcactatgcagctgtgggcagggagcacctgaggttcctgcagcaggcctgtccccacacctgagcagagggccgtccctcagctgctctgaggcctggcacccagagaaacactttcctagacagtcctggcgtcacagcatcagccatgctccaaattccgtcactcagtcatactgagctgggggccagaggccggcacttcccagcagtcctgtcctgggttatgagccttctctgattggccagctccatcaaccagttccaatcagtaatctgcaccgtacactagctcctccagccttctggtctaccagggtgcaggggctgtcctcgtgcccctatcctatcctgttttgtaaggagtagaaatcactcagtctggctttaggaggtgacctgggaacactcagctcgactatcagtacagtcccttcttctctaacttatggtggttcctctcacccaaaggggtagggcaggccccacagcaggacacactcactgccctttgcttttgtccctagccacatctcagtcgcatactcctgcaaggccctctaaaccacccccaccatcccctgcccaaatgcacgtcctctcaatcaccacagccactgttctgctgtcagccactgttccggtgaggagacatgaccaaggcaccgcttataaagcaaagcattgataactcctataaaagaaagccagggacttgcttgcagcttgagaggctttggtccactatcaccatggcagggaacatggcaccacacaggcaggcatggcgctgggcaagtagctaagaactacatcctggtccacaaggagagagagagcaagccattggcttggcatgagcttttgaaaccttaaagcccacccccagtgacacacctcctccaacaaggccacacctcctaatccttccccaatggttctacgaactgggaaccaagcattcaaacatagggcctatgggagccattctcattcaaaccaccacatcagcgatgtcctatgcccaggaagcttttgttctgatgggaagctctcatatggccccctcttggaggagggaaaatcctacccaagaacacagcatgctcatggctgagccgtgctctgtgatggatatggggtgccagtggtccccacccccagtgcacatcacctccacacgggcaaatccctcaaaatacgattccgaggccccatccacaggaatggtgacaagtcctgcaaactggaattttaggtgacctgcagccctgccaccctcccctcagcaggaagccctgagggttatcagccccaagggcacacacctcatgcgtctcacctaccaagaagaccgtgcctacaagctatgagagaaggaaggctataacccctagaggatgtggccagcagaacgcaacccagggaaaccagctttgttaccatggtatgattggagaagggattcgtgtaattgaccctctgggtggtgcagttcctgtctccgggctggccagggctggcaagaggtgggatgacctcatagtggtgcttacagctgagcagttgagcctgaccggggtagagggcaatccctggaacaaacagaaatcagtgggtgtaagaagtcacagccctgagcacgccacctcacctcacacctacctcctcgggaaaatgctgaggaggtagcagcaaaggggtagagggcacacaccccctcagtcactcctcaccccgcctggaatatggcttccagggctccaacactccaccagagcacctcatggcacagcaccgcctcccaggccccggctgtctgtctggtgctgcaaaggctctgggctgtagggttccccagagcacagttttctgctctgcccggcgcttcaagaacacgcaccacagagtgtcctgtgtgcgctcagctgaggctcctaggtcaggactcgggcgcagaaacgctgacgacaacatggtgtcaaggcagagctgaggttcgagtaaacactgccagaaagaaccacaaagccacagacacagccacaccaaggcaagaagcaaatgatcaggcctggagcagggcgatgtccgggagctccaggcagggggactcccgactctggttctagcctgtgggcaggatgtcctggtgtcactcctcactccggccacagctcacattccacctctaacacaacagatcacccactatggcagacaacagtcctcagggtcagccatgccaacatgcagaggaaggaacacaacagcctggagccctctaggctgggccctccctgagtgtgcgcctccctctaaccccgaatgtgtgcctccctccaaccccgagtgtgtgcctccctctaaccccgagtgtgtgcctccctctaacccaaccccgagtgtgtgcctccctctaaccccgagtgtgtgcctccctccaaccccgagtgtgtgcctccctctaaccccaaatgtgtgcacccctctaactcaaccccgagtgtgtgcacccctctaaccccgagtgtgtgcctccctctaaccctgagtgtgtgcctccctctaactctgagtgtgtgcaccccccctaacactgtgtgcctccatatgctagcaccttcctaagccctgctcccaccttgtggctcactgcctgtgctactctgaataaaaatggcccctgggcgcctgtgtttgaatgtttggtctccagttggtagaactgtttgggaaggattgggaggtgtggccttgctggtggaggtgtgtcactaagggcgggcttgaggtttcaaaagactgatgctgctcccagtgttctctctgcctcctgctttccattccagctatgagattccagctgttcctacttctgctccgccacaacagcctctaaccttctgtaactgtaagccaatcagatgccttcttttataagttgccttggccgtgctgttttgttttgacaatggaaaaggaaccaacacactgccctttttccctggacttcagttctaggcagagttctcgcctctctcccaagaggaccactgcctccctatacacacccagggccctgctcctcctcctaacaaaacctggctctcctgctaaccttcctgcccacccagggctccatggcctggcactggctctctgatgcatgcctacaactgagcgctgtccgctccactctgcctgtgctgggaacacaatggtggctcagggaggcaatgcttgctaaacaaaaccccagagctggagcgctgaagcctggcccagcaggccctacctggggcatcatagcggtccacctccttgtaagacacagacatgacagggtgtttgagcttctctcggaagtcagtgatggtctggtagaccaggaagacggccacagccatgagcagcaggtagatgaggatgagcaggacggagaagacgttctttaggcaggccttgctgaagcggatggtgctggaggcagactcgctgtccacgcctgctgacaggacagcagagagtcacagagcagccagcaatggtctgcttcctcgaggccttcgcctaacaagctgtctgcagggaccggcagtctcggtcagtcaggcccacattctgtcccctcccctgcttaacaacttccctttctttcaatgctggaactgctcatatctgccgttccgaggcctattctgaagcactgctcataaccaccctaccctgttttcacctagaaatgccctttcccaaggaaaccttcccttggtggctaatctgactcagtctccatgccgagcaatgtactcatgtccctctgatacgtgatactgacgccatacaaccagcaaccacgtctaagccaaataaaccatgttctcaaaaccatgagccaaataaacccctccttcttttaggtgtttccatcccagagaccagcaccgcagcgcctcgacctcagacacaggcaccaggtgtgtgaacatgtcagggggttccctgataagagccacatgggacggtgcttgctacggcagcctggttcaccttcccatggtgcttctgcccttcagttcacaccacagctccctgaggaaaaggccagctgtccctgtggctgtggcttccaacagggaccgagcgtcatggtcataccacctgcctcagataataaatgaccataagatctgaacggtgtcttgaaatttaatgaaggcattagaaaatgggcaaacgcaggttgacagagggaggggaatctacccctggagagaagaatggccccatggagatgcatgagtgcctaacttcttgcctgaaggcttataccaaccccctaatgatatggttcagggtgacagggttcagggctgaaagtcaaggggagatccccaaagtagaaaagtcccagagagatgagatccctaattatgcaaataattgatatgctcaaatcactgcctggaggtcccaagggctggaagagcagagctgaagtatgaagagaaatgggcaattccagctgctaccatggaaggcagtcaagcctcagagcgtccaccttgccatgccactgctgagacaaaagttcttcaaccacagaagagtccagaacctacagctgtgacagctgctctccccaggagacaagcctctggagactagggctttccagagaggattgaccacggtgagagggagcatccaggtgggaggactgcagagggagggatgacctgcagccaaagtgagcgccatctgccaatgggctgcccagacaggaagagccctgaggagaagggagcatggcctgcctgttcggctgcttcttgagtgaacactgtcaagccctgctatgcctaactccagttccccaggccttccaacgcagacagacctccagcagctcccctggaagcttccaggtacctagcacctagcaccaggggaactgccaaagcaccaagctctgtgaactaagcaggtaccaggttctctgcctctcctgcaggcagacagacatgctggactttatcatgtaagccagtctaacaaatgctctttgatacacatgtacacacacacacacacatacacacagagacacacacacattctattagttctgttcacctagaagaacacgcctaatacatcagtgttcaattaaaattactatgcatgaggggctggagagatggctcagtagttaagagcactggctgctcttacaaagaacctgggttcaatttctagtactgatgtaaaaggcttcaggaacccagacagacacgactaggagacatcttcaccatggaactgtttcagccagaagcacaggcgtaattatgtgacacaaaatatcagcttccaaaatttaagacttttaattttggggatgcgtgtcctatgtgccggggaaggtgcctacaaacaccagaagagggcgctgaggctcccagagttagagctacaggtgacatgggtgccgggaaacaccctcaggtcctctgcagattataagtgggaggaatgaaagtcaggtggagtcaagtgaggtggccccatttttatgtaacccaagcaaccagaaagccaagaaccaggaggtctcaaggccggcctggacttgtgacccggtgtcaaaaaggagctcccaacagcaagtatctccatcaacacagggacacggggctgcagggacaccggccctttctctatcacaaggccagatcctgatcccacagaggaagccagactgagggaacaggggtggagagttgctggggcttgctacgttctagcctaagccaagaaacatgagttcccagctgcaggggagaccctacgtcaaagaaacagacaacagatgggcaatgctacaggaggctatgccttgccctcttctgccctgcatagacgtaagcacacgtgccaacacagtaataatgacaagggctgcagagtggctcaggagtcacaaagcacttgctgttccagaggacccaagttcaattcccagcactcacttcaaatggctcacaactgcctataactcctgctccaggggatccaacacccttttctggcctccatgggctgcttcccacatacatatgtacataaaagtaataaatagagcctaacggtggcggcagcacacgcctttaatcctagcactcgggaggcagaggtaggcaaatctctctgagttccaggtcagcccggtctatggtattccagggttacaaagagaaaccctctctcaactctccccactaatctcaaaacatgtttacatttttataaaaatcccaaataggcaactttttgttttgtttctctgtgtagctttggagcctatcctggaaatccgcctgcctctgcctcccaagtgctgggagtaaaggcgtgtgccaccactgcctggcccaaataagcaacttcatgctgcacctcaaggaaccaatccagggtctgggcgggggggggggggggaagcccagcaattagagcacttgttgtgcttgcagagaatgaattgatttccagcacccacaccaagggcagagggcagacaaccacctgtaactccagcccaagccagcaccctcttccagttccctcaggcacccacacgcatgtgcacacacagacacaagcacagtcacacaaataaaaataaaattttaggtcaatgaaataaatttctttttgaaaaattaaaagaactaaatccaaagttagggtaagagttaacagagatcagagaatatgtaaatagaggttaaagaaacaaaacgcagggcccagggttgtcactggtcacaactgtgatcctggcactcaggaggtgcaagcaggaagacagggaactaaggccaccctcccctatacaacaaggacagcctgagatgcatcagaccctcaaaaaattaaaataaaaacatgaagaaagaggagaaatactatgagattcagcgatacaccattgtacccggagaagacaaaatcaggttactcacaaaagccaagaattggaaccaatctaaaggtccagggctggggagaaggttcagccaatcacacagacggatccaagcccaagcctaggactgtaagtgtaaaaaagccaagtcttgagggtcatgcttgaaatcccagagctggagaggttgagaaggaatctctctgggggctccatggcaggcagtcttgcctacacagtgagctccaggccagtgagagaccctgtctcaaaaaaggcacagtagagacaggagtggcatggacctacaagtggaccaggagacccaactgtaacaaatcaagtctggaagctcagatatttaaaaattaccacacaaggcaaggtacctcctggtgtggatcctcagtggctggaaagggaaactgggtcacaagttgttgggtcactgtcgtgtgagtagatcaattacaagataacaatctagaagttccctggcagtctgatggctccctgcctcgtggagtgaatttcagtcagaagagaacaacagtgaagacatcccatatatttatgcagataaaccaaaatcttagttagggtaggtaggattacaagttccagccatcctcagagagttcaagaccagcctgggctacataagaccttatctaaacaggaagtctgaatcttttcatttgtgatggggatggacctacaaacagacacagaaaggcaaacatcacacaagctcactcacgtggaaatggctggcctcaccagaggagaaaaaacaatgggtgccagacatagggaggggagcatgagaaaggtgagcccacagggtctcaagacacaggagacaggagccatgtgtccccaggccctcctgtacgccagggacttccggttagcagcggtgagccacatatttcaaaataaccacaagagattttcaatgcttttaccacaaaggagtgagaatgttatgagacaatgcagtaaccaccatggtgaactcaccacagagcgtacacaggtactgaaataccacagcgaacctcccaattacggacaactgtgtgtcaatttaaaaataagccagaccaggggggtggctttgtgaacaaagacacttgcaagcccaacagcctgagttcaattcctggaacccacacagtggaagatgcaactcccccaagttgtcccctgacctccacaatgcccaccctcacacaaaatagatgttaaaaagaaaaaaaaaaaaagtcagtcaataggggtcagagtatctgagtctgtttccatgctccacccagcctgagtctgcagcccttatctataagaacgagggaaccatcttgcagagttcctttgagaattaaaaggggtgggggtgggggtggaggggaggcagagtctggcatgggggagcagtggcaaacagtggccgcgctgccttctttcttggtctcctctaagcagtgagcagaatgacaggacttcctctccccacagacagaggaaccaagagaacagaacacatctcccagctcactctcggagctaagaaccaggcagggaccctttccactcaacacacacactcacacacactcacacacacacacacacacacacacacacacacacacacacacacacacgctcacccacacgctcacccacacaaccactcacccacacatacacactcatacactcattcactcactcacccctacactcacccacacatactcatactcacccacacacccacactcacacacacacataatcatactcacccacacacgctcacccactcatacactcacactcacctacactcacacacacacccagtcacccacacacccactcattcactcattcacacaccaactcacacacacactcactcacccattcactcacccccacactcactcacctacacacctacacactcacccacacactcattcacacaccaactcacacacctactcacccacacacttactcacccacacacctccccagctcactcaaggagcagacaccagtcagggactcctcccacccacactgtctagccaaggctaaggtaaacagctgtgactatgtcaccaggcttcactggagaacagacactggtgggtgacggacagaggaacctccctccaacagcaatactgcagaggacaggagtgcagaggacagggacatgaccctgccagcactggggagccaaggaatgattaggcattaactaggaaaggaagggaagcgcttgccccacaagcctagcaacctgagcttacccacaggagcccatgttaaaggtggatggcaagaactaggtccacagggttgtcctctgatctccacgcacacgccatggccttcaagccgtcacatacatgtgtccctgtcttgtgcacacccccaaaacaataatttaaattttaaagggggctagctgaagaggtggctcagtggctaagagcccttgctgcttttacagaggacccaagttccccttcccagcgtccacgccaggtgctcacaccgacctcaactccagctccagggcatctgatgccctcttctcgcacccccccccccgtatgtggcatacatttacacagacacacaccaacaatatataaataaaaacaagtctttaaaaaaggagccagagaacttcagaaagagaaatgaaacagcaaaggtggcctctgctgggcggacggggctctaagacacaaaggcctggttagaggagaccactgggctaaggatggaagcaaggaagttaagccaaagaagaatctgaaacaggagccctggtgagctcacccaccagatagcagtcctggagagggctgacaggagctcttctacaaggctctgagacatgatcaagacattgcagtctgtcacactgcccagcccctcctcagggaagagggatgcctggcctcaggaactcattaaaacccaccatcaagaatgcaggccttggggggagggttggggggagagggagaagggattgacatgtgaagcaagcttgttgctaatttgaactaataaaaaaaaaataaaaagaatgcaggccttgagcaggcacaggcatcctacacccggaggctgattaaatatgtggcgttttagaactggggcagaccttgagacccaacaccaggggacaagtgtgggggagaggaggctgccactccctcggctggcaaggcgcctggctgggcctcctgcagtggtggcagcagcaacagcacagccaatgtctagcaccctaaacccacttacctggcaagacccctggaccttggacttggactggctccttgtcccgctcgtctgcctgctctgagttctcaacgacctggtccaactcctcactgagctaaaggagaagaaaggagttagcagctcagctgaggcagccttgccttttcaaggctaaaaagcagaagctaccattcacataactgtcacacttacacaaagaccacatgacatgggatgtgtgagaccatttctactgtcttctctcacagcccgagcctgggaaactaaagttttcagcagggctggctccctccgagttgtgagggagacttgttcccagcctctctcctagcttctggtgacagccagcaacccctggcattctgttgtctaaccactgcctccatcttcacaaggtccccatgtagtgtgtgcccctctgggggtgcgtttttgaggacactcaaccacactggatttggggcccagtacaacctcgtctttgtgtgatacacctgagtggctatttccagttccaaacaagacaagaactggagttacacttccacatcccccccccctcctgggaaacaccaaaccacagccacagaggcagtcaatgaagcaggagtcactccaccttggtctagttcccaagcccatggtcttaaccacttcccagaggaagaggaaatgtggcttagactgtgctcagagagaattgagaacaacgaagctggtgtcagagcttgtggggactcgaaagcccacagatgtggggtgcaaatggcagaacagggtgagggatgcctaggtgacaagagttaattagcaggtgacaagcgttaattagcaacagggtaccaggcaatgcaacccatcaccgtcctcacctaacctgccagatgggggaaatcttggcattgaggaagcagagattagggtaagcgccctaagacttcaggaaggaggcagtgaagtcagtttggagagattccatccaactgggaggggcaatagcttttcccaggcttaacatgtgatcaagtaaagttacaaggtacacccctcatccccctactcctccacccctgagacagggtctcatgtaacccaggctggcttcaaactcactacggtggagaatgcccttgaatttttgactcttctatgtccacctactatgtgctgagcttaagcactaatcaagtgctgcacgagctcagctacaaacagccccagtcctcagggatctttcaaattcatcccagatgatttaagttaaagtctcaagagagacaatggtcccaggaaaactggaactcctcggggccaagcctggcccaagtcaccttgacccaggcctggcgacaccacctcccccccacctccccttcctgacacacagcagtcatcagaagcctttgcctgtgcccagccaaacttctcagagtgtcccccatcctggagcgccaaaacctcccctcagcagagtcaggttgactctcacaaccaacccaggcaagaaagacgcaggccaatctctgggttctcttcctgggacttcaaaacagacctgaagaaggtaaaggcccttctagagccttccacccgttgggcatgactccagcgaacatcggattccacctgtggccttgctctgcaagcagaacagcagcccgtgcttcaataaaacatcttctaagccctgctaagtaaggagatacccgccatgtgtggctggaccgcggtcctctgaagccaagtcccccaaacgccccagaagcaggacctgaccactgactgcatcctgttattcactcggggtcactaactcaaccgggcgctgagctcagcactcgtttggagaccgcgagtttccagctgctgggctggggaaagctgctgagaagcgtgggccgctccggttggacaaggtctaacggtgtggggcggctgcaccgcccgagcaagcctggagagcggaggcagacggcctaggatgcggcgccgcggggaagactcccagggcagggccggggccggagcagcaggggccctgggcgagcgcggctctgccagggggagccggaggctcgggccacagacaaagagctgcaggggtcgcggggcagtggaggcggcggggagcggccggccggagcccagagtccccgtcaccccgcgtgcggggatcacacagcggctccacctgctgcagagcccgcacgcacgggtgcctgccaatcatccacctgcgcgggggtcgcggtgctccgcccgcccccgcccgccctcacctcctggtaggatgtggagaggtcctgccggatcatggcaccagcccgctgcggctcgcccgggaccgcgacgccgcggcggaggaccgcgctgcaagatgtgcccgccgcactgagccagacccgctcgcgtctaccgccgaagaccaggcgtggcggcgctcggcgcatgcgcacctcctgctgccgccgggcccgcgcgggcgacgccgggagttgtagttctgtgaggcgggagaggctgcgggaagaaccagctgggctcaacctcctgccagagaggccagcgcgagtcttacacttcctctctttgtcaggcccgaggagccgggtgcctgagtgcagcgtggcccgcggtccaggtcagctgggtcggagcgcccagaaacgggaagaggaaacttggccttgtggtttataacgggaatgaaagtccagagaaccctgtgttaccaagctctccttgcccttatgtcttgacccttccaggcatcctgcaacgggaacatttttttcttacagattaggagattgtaagtatcctttaaggagatggtggtgaccaaaaagttatttcatctgggagaggactaacaaaatctgagggggtggtgatggtggaagcagacagtccctcactttgaagctgaaactggcctctaattcataggcaggaactgagtctcagcttcccaagtcctaggattacacctttctccaattcatagaatctttattcttttttaaagatttattaatgcagtgtgtgtgtgtgtaactgtacctcctgggtacaggtgaccggagagtatcacacacatcccagcctcctatgtattgttgggaagcaaacccaggtacactgcaagaataacaagtgctcctacccccttagccatcactcagcaggtgccttcatcctcaagttgcacacttgcaagtctgccccccccccattttcgccatgttctgagccctccttttgtctaccactacagccaacaccgcagcctcacagtaccttgtaagaagcaaaaagggccattttgtaaacacccacgtacctgttcagccttagccacaggctctgaatgtggggagaatgaaatgtctgtctgtgccgtgactcgggaccacattttcctcctctcactgcctagagccgctcaactgtgaagcagacagccgctgcttattaaacctcagcgagtgagcatggctctgtgccccctgcagctgcagcttggccccgccccaaccttctcttgacacttgactccttcccgtctcagtggcaagcatagtagcgccaaccacatcagggcagcctggttggaactctggaagtgcttgtctttagaaggtcttatatctcgaggtgtttaccagcagcagctagaagtgcccccagacaagtgagagccccaggtggctccctctagtgttaacagctcttacccaggcctcggtaataggacccttagctacaggatcctgttatacagttacacatgaagctcttacatacacctagataacaggacccttcgctccacaatgttacagctcttactaggcacggtaaggcagggttccccagcgttccccagccttgaccccagccggtattcccgctcctgaacctagggagtctgagacccttggccctcaagttccggcagctcccgaaatcttcagtaaccaggtcctacagttctcttttcaggcttgctttctccagccttgctcccgactctctacttttgtcatcctcgttcctgtgctggccatggccatgctctccaactgccaagcggctggctgtcttgctgcttttgctgctcagccttctgaccgatcagcttcggttgttgttgctgctgtcttgtctccaaggctgctggcttcctgtttcctgctcagcctgcacctctaaaagcaggcaatacaagaccactaaggaaagcttcttattgggggtaatgttgggacaccaagggagaggcagcctctccctgagtgagctaagcagtttgtttatatagtcagagaaggggtgtcaaaccaatcacagaaaacttcacaagcaaaggaaggtttgtgtttttaccaatcatgcatacccctgctgggccaccaggtgggagtgcccttcatctggcctaacttgaaatggttgtgggttacctagggttcgcaaggcttgtgatatagcaagtagtctgttatgaactgtgtgaaacaactctggctgaggtggcaacttcaagagccaaagcagtgggttgcaatagctggatagttttctaaggctcttgggcagtgttcagaatggctggtgcagccataagatagtcagctgactatctaactgacagtctttctgcctaagacagccaggacagcccaatcagggctggttatggcatccaattgccctacccctaccccataaatgcctttgtttatctgtcagaaataatcatcagaaggaatacttaagaacataacagatctttgataaaagcttaaccattctcaacacctgcccagtgtcacaccccgccctaggtcctctgctcttacatctattaaatgggccagtgtatagacaatacacatttgatcatagccaaagcctgagaagcagctatagacagtttgtatagcacctaagacagtgtaggtgctcaacaaatgttggttaagtttattaatagaatactagctcagccatctcacttaattagagctcactgtgctggttagttttgtgttaacttgacacaagctggagtcattttggaggagggaacttcaaatgaaaaccttgtcccaccagactggcctgggatgcattttcttgactgatgatagatgggggagggcccagttcatttgggcagtgctaccctgggttggtggtcctgggttgtctgagaaagcaagccagtaagcattgttctcccatgacctctgcttcagctcctgccccgacttccctgaatgaaggatttaaaagctgtaaggtgaaataaacccctttctccccaagttgcctttagtcatggtattttatcataacaatagaaaccctaggtaagacatttaccaaagaaaaatacaagcaattaattaaatttcttactgtatggatcaaaggttagctgatggaatgtgtcacacattggattttatagcccaaaggaaccagatcaatctaccccagccatactggaccaatggtacatttggagtcaatacagactaatgcaatggtcaacccagtttaactcgtacaaagtgccatgcccacactggatcctgaagtgactaagatacccagctctctcattcctgtggctttgttgtgtgagtgcggagaggccataaaaatggggtttgcagcccttgatgtccccaaggcctcttctcccaccctcctgagcagtcatgcttcaaaagagtgcgtctctgttttgtgacaccacatgtctcttcctgattgcttggtctattattagcaagcatgtgagagattgtggtttgtgtgtgtacatgccacggtgggtacacggaggtcagaatacaactttttgtagtctgttccctccttccacctttatacaggttccagggcatgaactcagtaaggcttgcaaggcaagcactgtacctctgagccatctcactgcccccccaggcttcttgtgcctgtcctccctgcagcactggaccccaatctcgacatgctttcccgccaggcttcatggaccccagctgataccttctttcccagtcttgtgctctggctcctccccctagctccacaaggtgactccttaaaacaaccttctctagctcctttcctctggttccctggggccctgtctcatggcttcaattactctctctgtcctagagtcttgaatgagtttttatcccttcaaaaaatgttcatccgtacttcagaatgtgacttcgttggaaatagggtcattgaagatttaatgggacttaagtggcatgggataggccctctccaaatggacctgtgtccctatgaaaagatggaagttgccttcttactttcccattgctgtgatacaacaccacgagcaaggcagcttataaatggaagcatttaatttgctttcagtttcagaggttagagtccatgagtgtggagtaaggcccacatcttgtttgatctgcaaccatgaggcagagagaaaactctgagaattccataaatcctttgaaacctcaaagccacccccagtgacacatctctcctccaacaaagtcacacatcttaaccctttccaaacagttccaacaactagggacaaagcattcaaatatatgagcctatgggaggcgttctagttcaaaccaccacagacagtgatatgaagaccagacaggaggataccatgtgacgacagaagcagcctgaagtgacatagcccagcaagccaaagtgggtccagttactcacatgatggctgcaggtctccatgccatccctgggccatgtgtgcctggggacagctatggacccagtccaatacaaaatcaccaacttagttaaaatatttgattggttttttttttttgtaatttgattggacagttctcaaacatgagctttgtagatgacaacattatgtcacaatggcaaaaaattggatgcatctacaaatcatccagtttgtggtccttcagtgcagtggccataggaagcagaccccactcccaaacgcacatgaacctgtcactgcctgctgtccgagccctcggcttgtatgccacttctccactcaaactccacccagagacaccagagggccaatagcaaaaactggaaccgggcacccagatgcccaagtcttggttctgttctgaccactcctgtggtcttggtagttactttaacctgcctggacctcagttacctgatgggtaatctgacactattactacctgtttgtgacggttaaatttgtctgccaacttgaccatggaataaggaaccctaaggcattgctgagatattggtaaggaattgtatcctggggatgaggggataaatgatttatcaggaagtatttagagcagcatttccattgaattcagtccagaggatgtgctgtctgagattggcaggtccaggaaagggaaagggccagttgctcagagaggtcagaaagggtatcagagccctgggactggagttactgacggttgtgagctgccatgtaagtgctgggaattgagcccaggtcttctagaataacagcaagtgttcttaaccactgagccatctctccagcctcagtttctattttctctacagataactattgcttccaagtgttttttaaaaaaatgagtctgggtttgagtagcagagagcacttgaggtacctggagaatctgggttcaggtagatgctagtgtgcctggtggatatgttaatcagttataaaatgatccttagtgtctctgggaagttggcagctaggtgtggtcatcagaaatcccaggaaggatcgtttgatttcaagagggtcctggcacataggcctgcagaagaaggggctggagcagccagacagagtgctgtagggccgatgttgtcaagttatgtttggcctgaagagcctcttcaaggccacaattgtgtttgttgcagcacagtcctataaaacagccagggtaggaggcttcctgcaagagtagccttgctgcagacacaaactagagtgaaaacctggaaggaagaaggaagggagggagggagggagggggaggagagagggagggaggagggagggaggaaggaaggaaggaaggaaggaaggaaggaaggaaggaaggaagttagctgggcttggtgccacttgcctgtaattccagttttctgaaggctgaggcaggaggatcaccgccagttcaagaacattataggctacatagtagtactaagtctcagagaaaggaggcgagagagaagccggttaataagctgggccgtgtcctacagagctcctcccatggtgccgacggtgctccgccccgccccgccgtcctcccgcccgctcctcgcggtctatggcgtgcccggcgcccgggtggcggctgcggccgctggcggcgctcgccctggtgctggctctgaccctggtgccctcggcccgcgctgggcacacgccgcgccccgtggagcgcgggcccccggtgcggctcttcacggaggaggagctggcccgctacagcggcgaggaggtaggcggcccggcctgggccggctgctgtccccgggccccagcccgtggcaggggccccacgcgaggcccttggtggaggccgagcgttgccctcacgccacaccccacacttccctcgctccgccttgtcgccgtggctttgagcacagacctcagacctttctagggccacagggcctgcgtttgtggagaggccagccagcgcgcgctccctgggacaggggtgctggggcgagccagcatgatcccggccttcccagccctctcttcctgccccggctgtcccaggctttctgaaacctatccatctaaccccatttagtgtctgggtccgcgggggatgaatacagagggggaagcaacgcctacacacacacacacacccatggcattgcagtgctttctaggaatgaatcccctgcctctacccatggggaaactgaagtgcgcggtggttcaggagggagggactggtgttgctttgctgaatctctctggcctctcctgtgtgttagccggccttccatagaccagatatacaagggtcactccaaagcatatccttatgagtgactgcttaggccagcggttctcaacccgtgcgtcacgacccctttggatcaaacgattctttcacagggatcccctaagaccatctgaaaacacagatagttgcattatgattcataacagtagccacgtgacagtcatgatgattttatggttggggattaaagctcacagcgttgggaaggttgagagccactcgtttagacacatgggtccgcgaggacacacggacatgatgtgtgtgtgtgtccgggggtgtgactggtgctaagggagagccggagggagctcttggtgcagatgtgtgcagaaaacagcttagcaacctactgaggcgttccattcctccctaacggatgggggtgtctggctgcctgcactgggtgtgcagtatggtttctgtggatcgctctgcatgggagcatccagaatagctggggaagaacccacggtttctagtgggtgactggctcctcatcacttgctgctgcgggaaagagcgaattcaaggggaagagatggtgcaaagaacctgggagtatggccctctgcagagttctttgcattcatctgtatcttggccccacccccagcacacactccaaggaaaggcagacccagagactgcaggccaagggctgagaaagaccctagtttttatattaatcatattggggattgaaacttagggtagagaggcataacttggggcagaatcctaagagtaccctgggaagaatagtagggctgagcgtgccggaaacagctctggtctaagttttggatcctgagaaattaccagtagcccccaccacagcataataataatgcgatgtattatttggtcactcaaaacctgaaacctttggatggtacctggcttgcattcctgctgtgctttgtgatttgagccaagttactaagtctcacagctgccataatttcaacttactgtgttggcaccagagagagggggagatgttattacaacagtttgtagatggtggggctggctaactcgccaggctggaccaggaaggaggctggaattctccagcaggtggttctgcctcccctctctttccttccttccttccctccctccctcccgccctcggaggggttgttgagacatagtgttgtctcactatgtaattctagctatcctggactcactatgtagaccgggtgcccggagaactcctagagatcttaaggcaggtaccactatgcccgcccaggtggggttcctttttcttcagggaccctcatggccttttggtgggttggggctggccacatccatgcagattatctgtggtgactttatgtaaagtcacctgcctgcagatggcgtctctgcatcacctggctgagtactgataaactttggttggtagcacttctgggtggctgtgtaaaactcatcacacggttacagtgagctcctccccgtcacaggcattttgtgatgatgaaagagctggggacacacaaagtgcttggcacagcgacccttgagcagtgtcagctgctgccagccttattagattgtatgaaagttaacgagaatgttgaaggaaaatcttagacctggacacttctgttttctttgcctttccactattttctcctatcccttttagtccgttgacaaatccctgttctgtgacccacagatacgtcatgggtgctgcctgaggttagaagaacatggcctcaccccaggagggcagagttttctctgaaaaaacccacccatagcaggttccctcttttccacagaggggtgctgaggagctggtctggctcagccctggcctgggcccagagggtggtgaggcacaagagctcaggccaatggctaagcccgcctgccagctgtgcccagactctacttccttgctctctgcccagcacttccatggcccctgcactggagctatgaggccttgccattgacctcagtttggccagagacaggcagaaagaccagatggtgaggtcactgtatgacccaggtgaagaacagggaagggaaagcttgtccctcctgccatgcatatgctctcctggagcaccaactgtgagcccctactctcccctacatcccggcaagttctctctgggctaaggatgccctctggtggtcatgagagagggcgggaggaaccttgtgttccaaagctccacttgtggtccgtcctgccttcccctctgagtcactctatcatttaacctccttgggtccaaacagccttactcagcagggcctcaggagaactgagttcaaggctagcctaggttacatagcaggcagtttctcaacacacacacacacacacacacacacacacacacctctgcacatatgcacaactaacggcctcacccgtagggaaagtgttcaagcatcttctagactccttccagttttaacttcaaagtttctgtgaacaatgtggaattgcattttgagacaaggtctcactgtttagccctgtgccttacagtttctgttgctgtgatgcagcatcatgaccatgaccaaaggcaacttgggaggaaagggtttatttcatgttacacttttgggtcatattccattcactgaaggtggtcatggcagaaactcaagtagagcgggaacctggggccagggactgaagcagaagccactgggaggtggggtgctgcccaatggctcactcctcacgcttgtgcctgctttcttattgcacccagcaccaccagcccaggggtggcactgcccacagtgagctggtccttcccacatcaaccaagaaaatgaaccacaaactagcctataggccagtcttacatggatatttttcatttgcggtttcctcttccaaaatgtctttagcttatgtcaagttgacaaaacagccagcctactctggctggccagaaactcactctgtagaccaggctggcctcaaactcagagatctgcctgcctttgcctctgcctctgcctcttgaatgctgggattaaaggtgagagctaccctcatctagccggattacacttaagatactttccattaggaaaatatcagtttttcttcttggttatctgattcttcttgagtttacaattcttaaaacttaaattgggctcttccattttgttctcatctctcttgagtggcagcagccagaatggtgttcaatccctttgtgactttggaagaggcattccaatgtccctttccacgtggggaggaaggtcatgtctcccctctttctagagagctgagtataatgtccatcaatgccctttgaaaggatggcaaaggtcatgttgtacgaggaaccctcagaggtcagcggattgtcaaagtggtccaggtttacgggaaggaggttgtcactgaacaagtgcagtggggagtgggggcttaacagtgcagctgttctcatgggcattcacccaagaaggtggctgtcacccaggccaaagttagcagagtctctggaattggagttgcagatggttgtgagctgccatgcaggtgctgggaatcgaacccaggttctctggaagaacagccagtgtgctcttatccatggagtcatctctccaggaccaaataaatcttttttttttttaagaagcaaaataaaaagtgggtcactagcatgcatgacccatgtgcgtctgttggtgacaggaattttccattcttttgatttgtattttatttgttattttaagatagggtctcacgtagcccaggctagtctcatttgataagtagctgagactaaccttgaacctctgatcctcctgcctctgcttcctgaatgctgagagtatggagtgcaccaccatgcctggctctcttgtctgcttccagtcctgactgtttcgcattgccacactttctccatggcgctttatgacccctgagctttggtgaatgggtgaatttggcgaattgcctgagaggtggtgagagcctgccagggtcaagccttgggacctaccacactgcttacctagcttgtgggaagcagtcctcacttcctgtgtacagagagccagtgcctctcccctgctcctcacacttctcccctgctcatcactcctctcccctctcccctgctcgtcgctcctctcccctctcccctgctcgtcactcctctcccctctcccctgctcatcactcctctcccctctcccctctcccctgctcatcactcctctcccctgctttccaggaggaccagcccatctacttggcggtgaagggagtggtctttgatgtcacctctggaaagggtaagtggttctttctttcggaggaatgcagggcagggcagggcagggcagggcaggtacctggagggtgaggcaaagggccatgtcaggcagggcctctcgcttccctcttccctctgaaagggccctgatggagctgatcccggtcagggttttaccaagaggtctcatctgtgtagtatccctctcaatggctcctatttgaagggctgtggaatccacttcaaacccaatgaactccaggtgaagccagagcagtgccctcagttaagagtggctgctgtagaaggggacagaacattgcaacaccatgtcacagcttcccgactctacccatacatagtaccaggacgtggtgtttttaaatatttttttcatttttattttgtgtacgggtgttctgcctgcatgtacgtctgagtgccatgtgcatacagtgcttgcagaggccagaaggatgttggatcccctggaatggctgtgagtcatcatgtgggtgctgggaattgaacctgggtcctgtacacgagtcagtgctcttgaccactgagccatctctccagcccctggaggtcggttttcacgacccatcctgtaagagcacatggtagaaggagacatggccgcctgaggcgtttgagaccagaggctcttcttgtctgtatttgtgtgtacatcacatacatacatacatacatacatacatacatacatagagacaaacaccacacacacacacacacacacacatacagacacacatacacacagtcacacacacgcacacacagtcacacacacgcacacacagtcacacacacacacactcatgcacacacacagacacagacacacacacacagacacagacacacacacacatacacacacatacagacacacacacacagacacagacacacacacacatacacacacatacagacacacacacacacagacacacacagacacacacacacacacacacacacacatacagacacacacacacacacacacatacagacacacacacatacacatacatacagacacacacacacacacacatacacacacatacagtcacacacacacacacacacacacagacacacacacactcatgcatacacacacacacacacacacacacagaactgaaccaggactttatgtatgataataaaggtagcaaagtagtctaccactgagccacaccccaccccccctcctcctttcccccttttaaatacttattttgagatgggtgcaggctagccttgaacctgcaatcctcctgtgtcagcctccttcctagctgtgatgacaggcctgcatcgttaggcatgacttactttttaatttttaaaaagacttcattgtgtgttttctgcaaacaatcgctcagttggcaggtatgtttcactcgtgttctggattggtggagcaccactctggactggtggagtaccattctggattggtggggtaccatcctggattggtggagcaccactctggactggtggggtaccattctggattggtggggtaccatcctggattggtggagcaccatcctgggttggtggagcaccatcctggattggtggagcaccatcctggattggtggagcaccattctggattggtggagcaccatcctggattggtggagcaccatcctggattattagagcaccgctctggattggtggagcaccatcctggactggtggagcaccatcctggactggtggagcaccatcctggactggtggagcaccatcctggactggtggagcaccatcctggattggtggagcaccactctggactggtggggtaccattctggattggtggggtaccatcctggattggtggagcaccatcctgggttggtggagcaccatcctgggttggtggagcaccatcctggattggtggagcaccatcctggattggtggagcaccattctggattggtggagcaccatcctggattggtggagcaccatcctggattattagagcaccgctctggattggtggagcaccatcctggactggtggagcaccatcctggactggtggagcaccatcctggactggtggagcaccatcctggactggtggagcaccatcctggattggtggagcaccatcctggactggtggagcaccatcttggattggtggagcatcactctggattgatggagcaccatctgccctgccgtgctcatcctcaaaactacagcctttcagaggattgtgggagctgtagagccccaagtgtaagctcctggatgctctccatgctctccatgaccacccacactctctccccgccactgcagagttttatggtcgaggagccccctataatgccttgaccgggaaggacgccaccagaggtgtggccaagatgtcactggatcctgcagacctcactcatgacactgtaagccgatgaacatttgtcaaaatgcactgttcccatgctgtggattttgtccttgttttttgtttattgtttttaaagacagggtgtcactatgtagccctgtctggactggaactctgtgtagaccagactggtgtcaaactcagagattcgtttgtcaccactgtccagtgagataagccaaattcttaagtcctaatattacagaaataagggggaggatttagctaaccttccattactgtaacaaaatatctgacataaataactttaaaaattatttttatttttgtgtatgtgtgtgcccatatcagcttatgtgaaccacacctgcaggtgcctagagaggccagcagagggcgtcagagcccctgcagctggactcaggcagttgtgaactgcctggagtgggtgctgggaaccgtacctggctcctctacaagagcagtgcccgtccttaacactgagccatctctccagccttgaaagcaatgtctaaagaggaaagggttaatctggaggctgtggtccatgagtgactacctcatggctacagcacgcaaaaacccatgatcctcatgaccagaaagcagaagagaaaggggcgtggccagtgtcccacaattcctgtggagggcaaactctcaatgtaaggaccactggctaggccccgcccttaaagtctccatcacctcccaatagctgcgccctggagaccaaaccactgacacggggacctttcataaagtgacactgtccctccaaactacagcagacagtaggcgtactagtatagagaagtgggcacaggctgtagggccacccgcccaagacccggtgtcctgtggacggtaattcctatttgctcccctgcattcttcccctgcacgcagccggcactcccctctccacagacgctttgcatctacaccttgcacacatgtgccacactcacccctgcacacacatcctgcacttcacctctatgtgctcacacagacacacgctgcactcacccctgcacacatcctgcacttcacctctatgtgctcacacagacacacactgcattcacccctgcacacacaccctgcactcaccctgcacatacacatgctgtattacacctgcacacccgctgcactcacccctgcacatacatcctacacgcacccctgcacacgcccgctgcactcacatcctataaataccctcacttaccctctgcacacattctctttatacttaggactgtttctttaaaagtctgtaggcaaactttttcatcaggaccggggactccccaaataaccacacagagacttactattaactataaatgctcagccagtagcttaggcttgttactagctagctctttcagcttaaattcacccctatttcttatctacgctcatcatgtccgcctcctgatccctctgtgtctggctggccaccccgccctccttcccagtgctctctcagtctggttctcccatctaacctcttcctgtgcggccattggccagtcagccctcattaacaatgatggcgacacatcctcacagcatacaaaaggactgctctacagcagttgtccattgtgtgatctaagaaggttttccatgtatttctggcaagcggggacaccatgaacacaaaggtatctcggggtgagcctcatccattgtgtacttcagaggtgctgactcctgccatttccctaaatgcaagaaactccctgcataaactgtgatggtgaggactgtgtttctgatctctccttaaaaaaaaaaaaaagaaaaaggttttgtttttgtttttcttaagtgtgttttcctcttgcatttggggtttggagtgggtaggacagggccagagagaagacagtgtcagacacaatgcagtcaaattcaatttgctcacctccctctcctgtttcttctccccaagacgggtctcacagctaaggagctggaggccctggatgacgtcttcagcaaggtgtacaaagccaagtaccccattgttggctacacagcccgcaggatcctccacgaggatggcagccccaacctggacttcaagcctgaagaccaaccccactttgacataaaggatgagttctgacgtctagctgcaaagggctggttctggggtgaggtgaggggtgggacaggggttaagtgtcccgtggaacaatctggggaagcccccctggggtcacctgcatctgaataaagctgacgtttaactgggagactgctctgtgatgtccttggtgtaatgtcctatgcctgtctgggtgtcccagcctgcacagcccctacggtggtacatctagctgcaactgcaggtcaccgttgctgtctcggtggcaggctgtaaggaaccgtcactgcctcttcacacactcgagtgctcccaacttccctaccacagccacgttcatgtgcagtaaggatgagaataacgaccccatgcagcaaaagaattctctctgtacttcatatgcacagcttgcaggggagggagtgaggcttgaggttcccatccttgtctgcctgtgaagacgctgggagatggtcaggaccttgggggcagtggaggtcaggaccatggggacaggggaggtcaggaccatgggggcaatggaggtcaggaccatgggggcagtggaggtcaggaccatggggacagcggaggtcaggaccatggggacaggggaggtcaggaccatggggacagtggaggtcaggaccatgggggcaatggaggtcaggaccatgggggcaatggagatcaggaccatgggggcaggggaggtcaggaccatgggggcagtggaggtcaggaccatgggggcaatggaggtcaggaccatgggggcagtggaggtcaggatcatggggacaggggaggtcaggaccatggggacaggggaggtcaggaccatggggacaggggaggtcaggaccatgggggcagtggaggtcaggaccatgggggcagtggaggtcaggaccatgggggcagtggaggtcaggaccatgggggcaggggaggtcaggaccatgggggcagtggaggtcaggaccatgggggcaggggaggtcaggaccatgggggcagtggaggtcaggaccatgggggcaggggaggtcaggaccatgggggcagtggaggtcaggaccatgggggcagtggaggtcaggaccatggggacagcggaggtcaggaccatggggacactggaggtcaggaccatggggacagcggaggtcaggaccatggggacactggaggtcaggaccatggggacaggggtggttaggaccatgggtaagaaaggagaatcgctggagggatgaatgggaattggcaatcgtgggaactggccacagccagactgtggtaaggagcttggaggcgagcctggccagtggtttttcagagaacgctgacacccacacctcacactggtcccaggtcccaggaagaaattcctcctctgggggtactgcccctgctggtgacataaacactctttgaagacagtttcagttgggttctaaggactacagggatgtactgcacctgtagacagaattacctggcccaaatgacagacatgctgagtctgagacaatgctgtgtcatcgtgaaccctcagaccttgtaggagcaggaaatgtctttatataagccatttatctatttatttacccacttatttattttgtatttttgaggcaggattccactatgtagtcctgactatcttggaactcactatgtagatcaggctggtcacaaattcggagagatcagcctgcctctgcctttaggattagaagcatgtgccaacatgcccagcttatcctttgttatttactaaaatcaactgtcctgtagaggtgactcagcagttaagaacaggaactattcttgtgagttgagaattcacaaccacctgcaactccggttccaggggacctagtgcctgtgacttccctggacacttccactcatatacacctgctgctccctctgcatacacacaattaaaaataaaaataaacctttaaaaataaatgcaggctggagagatggctcagcagttaagagcactgcctgctcttccagaggacttggatgcaattcccagcacccacatggtgtttgcaaccatctgtaactccagccctagataatctgatgccctcttctggcctctgtggacaccagtcacacacacggttcacaacttacatgcagacaaaatacacacacacccattaaacaaacaaacaagtctaaacagcaacaggctgggatgtagctcatttggtagagttgcttgccttagcacgcatgcaactctggattccagccccagcacaaaacaacgggagtggtgacacacacctgtgatcctagggcccagaaggatcggaacttccacactgtcctcaactatgtcgtgggtttaagggcaatacttggaatacttgagtccctgacataagtgtgtgtgtgtgtacaaaactagaaattaaagtcagcctatgagagagtattttcactaagcagaggactgtccagatccatgccccaggactcagtacccctacagcatagcctgggaacctttgactgttgttaaccagcgccttaggaagctttgactggattaaaggcactgggaaagccaaccctgggcttcccacacctcagagagagcaggttcggatccttcctaaggactggtgtgactgtcactgtcaccttacttggtggcacattccagggctggggaatctaattgcaagccactggacttgctgtcctggactcttcattcctggcataagcagatatgcaaggccttggagagatgggtttcagagtcataactgcctttgagtcctgactgcgtcgccacagctctgctgaggttagttagtttcttggatcttcagtttcttaatgtttataatgagagcaaaaacagccatggcacaaggctggctcaggactgggggaggcaggtgtgtgttgtacccagctggctcctgacacctgtgagtgatgcatttcttcacatttgactcccctctgctgcatgctgcctccaccttccgggccagtaggcatcttccagctggggtatgaccacaggtaggcagaaggcatttaggggcatgcccagtgtgggggtggtagactgggctttggaagaggcgtagatgggcagcagcgagtgagcctgaacccgagccctagcctggctttccttgtggaggttccttcctgcagcttcaaggctcccagatgccctgcagagcctctctgcatcccatgggcctctctccagagaatggcccggctgcatttttgctaccccagggttcatcacaactgtttcagtggccccagctcatctcatcccaaaatggaagtaatacactcaacctcttttggacccatgcaatgctgtccctgccctcatctacactggctgcaaaaccctatcttctcttagatacatcatcagggaagcgtctcagaccccgacatggccctgtgtggtacagatccttctgaacagaagtggtattttatagcttcccatggggctggatcccctcactccgtttgccatatccatgccacctagtgtgaagtccttgaatgtttgatcccatgaacagaagggaaatggaggtgggaatgaattggtactcctgtctctgggcatagccttcaccagccatccctctctaccatgctcacacgtgtgtgtgtgtgtgtgtgtgtgtgtgtgtgtgtgtgtgtgtgtgcgcgcgcgtgtgtgtgtgtgtgtgtgtgtgtgtgtgtgtgtgtgtgtgtgtgtgtgtgtggtgtgcgtgtgtgcgtgtgtgtgtgtgtgtgtgcgtgtgtgtgtgtgcgtgtgtgtgtgtgtgtgtgtgcgtgtgtgtgtgtgtgtgtgtgtgtatgtgcgtgtgtgtgtatgtgtgtgtgtgtgtgtgtgtgtatgtgcgtgtgtgtgtgtgtgtgtgtgtgtgtgtgtggtgtgtgtgcgtgtgcgtgtgtgtgtgtgtgtgtgtgtgtgtgtgtgtgtgtgcgtgcgtgcgtgcgtgcgtgcgtgcgtgtgtgtgtgtgtgtgtgctgagccttctctcttcctgccaagctctcctctctggcacagcctacttgggtatcacctcccagaccaaccttgccagtgtttccatggctcatcagccaaagcctgcatgaaaatagcaagggtcccccaggcaaccacagcagcaatcggtaaccagcctgggcattctgggaggaaaacaaacactgcccttgctagtgatcttggctgcccagggagccagctgggctgcctcttctggcctctgaccacctgctctggagtccagaggggaaatggggtgggaggagactccctggagccagaccatcgtcagtcctggggttgccaccctgtcccctccgtggggtcactgaaggccactgctaggttccctggtgtccagggacttccctgagtgatgttagcatctttcagccaaagccttctgatgctttagtcttggcttaggtcctcagttccctggctgtagtccctttctgccctccagacagcctggttcttgccttctcctctataggatgcttagagggtgggggtgtgtcacctaaggtgctggaggtcctgggggagtggggagggacaggttgtgaactatagcagttcctagaagagaaaggcaagagggtaaagcagatgtggccaggaagcagggctcagtaccacctgcaggaaggaagccagcagctgagatccaagctgtttggaggcagagcctggaattgaccctgggtgtgtgcaagtgggacattcactctgtggctcctttggagctgcctggctctctggctctctgtggcccttgtctcacacgccacctcctggaacgagaagcttgttgcatgccttggctctggttatctcttactcctctggcgagatcagggagattcagggtgatatagccgtaagtaccactgtaatctccacttctgctcaggctcagcatccctcaccctgatatgcttgtctgagtctgcagcctggtaggtggcctgctcttgtgctctgcaaggaccatgtactgggtctctgtatttactacttggtatacaaaggtggagtcttctgttggagtcgtggctcagggcaatgacagtgaggacacagctggggttggggggcggggggggggctggctggtggcagagactctggatcctgggcaggaaaggcatcttgagacaccaccacctccacctccttcccataatctaatccttagattagattagattagattagattatgggactgtaaaatatttacagtgttctagactgctcgagaattctgtggtgacggtaagctattacttcgatacagacttggggtcctggccccatggtatcttcaaaggaagtctgtaggagccaggcccaccagggggagctatagctgatggtggcgactagaagcccaggtggaagccaggtgggaagtggctatgtctttcccgtcctgccacttgggaccctgcattggagggtttggtctcagcattaaggagcattttcctaaaaggtcccccaaagctcaagcaatgtcttcctgcccaaccctgtctggtcctctctccttcccctcatctgtggtcttctccttaacgcctcgctatgaccttctctgacccaacatgctctacttcctccagcacgccattaaaacttgggcagcttttcattcaagaaactacggggctggggaggtggcacctgctggcaaacctggcacttgcgttggatccctgaccctgaacctgggtcttggcacatggctgtaattctagctctcttgcttccagatgggaggtggaaacaggagaagctcctgtaagctcatgggccagccggcctggagtatgcagaccagtggcaaacaagagagaccctgcttcaaaaacaaggttgagaaacaacacccaaggttgactccgacctgtgacacacatgacctcatatacaaacatgtatcatacacacatacacaaaaataagtattttttaatggaaggccattaactttcaccaagctcctgcactgggttcccaacaggacaacccaaaatggagccccacatgcacgcaagcctaagatctgcccttcctagaagcaggagagacgacaggccaatctcagtgagcagagactctctagaaggaaagggagtttacaaacgacctgcctgggaccagcgcgcttctctcctcagccttctctgcccacgaaagtcactctctgataggcccatgtgttatactttaaaaaggaaatggtgggaaggactcacaccgtacaacagggctcacatgggaggtttactggaagaggagagagaaaggggagagactggtccttggaacaagagtggagagacagacagggcagggagggagacagcaggtgggcaaaagggaacgtagtgaatgtgcacaggtggtactcttagtggcagcagctgagggcgtgtcctgtcagaactacaagggcaggccagtgcagatgactgaagactaacagcatgggctcattgaagctaattagatgtttaaaactgctctttgatgctgttaactacacttttacacattcatctgttgaacacctagatgaggcagtcgggccgtgggttaggtcctggggtttatcctggaagaatttaggacaagaggaattggtctggctctgaagggtcccccgcggggaaagcagtgagctgagttgcaaagttgttttcctaggaccaggagctggtctgcgggcagcagcgcagaatcaggtagcagggatggcaggtggcttcctaggaaactgccgtcacactatggccccctatagccctctatagactgcgcacggtccagcaccggcacagaccacagtgccccctggtggccgggcagcagccgtcccagcagttgtcttgaaagccaggaggattaagctttgctcaggaacttctatttttggttctcagtatttccaaaacgaaatgctaacaggagcagccagatggctcggcaaaggacccggacgccacactgccgggcccttgttctacacccctgttcccaggactaaatctgctcttggctcccaggtgctggtgtctctactccacaggctttgatgcacaggtcccaggggggtggctttttctggtcacaatctggctgcagaggcaaaagagtgtgtagtctcgtagtgacgtgttggaaagaacagcagatcccgggtcaggaggctgctgtgcagctcacgtcagcagcaaagaagcagtgatatagcaactacaataatagcgtggttgactcactagtggctttaacccagcttggcatacatggctgacttttgctcctggagaccctgtgagaccaacactgtccccattttctcaaggcccagggaaggttcagtgtgcagcagagcgaggacctgggttcctctgtctggggacttcctgacacagtcacatttagggcacccttgcacctcagttaccccacaaacacccagagatctgtgtcctattaggtctacagtactagccatcacatctatgacaccgtttccacaatctattgttactcccccaaatgcatgtgtggccttttgtgggtctccgtgtggtgttaccatgctgttttagtgtttgtcacaaggtctcatgtagcccaggctggccttgaactcaacatgtagccaaggatgaccctgagctcctgcctctcctgctctcctccatatctgtaatgctggggttgcaggtgtgcacccctgcccccagcacacaccgtatttttcatgggggttttgcagtaaagcaaatctctggcacttgcctcttttgtaacaaaaatatttttcctatttttttccactttccatcccaaccctggaacccgccaccgtgctctgttcctaagttttaactgctccagatacctcatagatgtggcctcatgcagtgcccgtctctcactgtctggctactttccctggaatacagtcctccagggttttccttccatgcgtttcaactgacaggagttcctcctccctttttttttttttttaagattttatttatttattatgtatacaacattctgcttccaagtatatctgcacaccagaagagggcaccagatctcataacggatggttgtgagccactatgtggtttctgggaatcgaactcaggacctctggaagagcaagcagtcggtgctcttaacctctgagccatctctccagccccctcctcctccttctaaaggatcaataatattccatggtgcttcacttccatgttttattctttatccatcacctgttgacagacatttgggttgtttctatatcttggctattatgagtaagggagaaaaaactacagtttctccatccaaagcaaacagaagaacaccgaatgaaaatatgattccgttgggtctgtattacaggaaattatatttcaggaaagcctggcttgggagagcaaacactagctgccttccaagacacataaacttgggagagaggacaccacctcgagcatgcctctcccaggcccaatggctcaccagacagagccctgcacagtatgctctgacgttcagacctgccaggtcctgtttgttcatggtgcatgttgctctgccaaagtgtgtctgaaaggattgttgtgaagcatcctgttggtctggctctttctgctcccttccaaaattatttggtagagaccagctctgccaatctcaagaatcagggacttgacctcacctatcccaacaggtgctggatgaacagggaaacagtacaagccgtcctcctcagctttgtaccagctgcagccaccaaacagggtccctgggtccctcgaaggtgtctcaggaagtgccctaccctcctcacccagctgtctgaggtgacatctgtggcttgccctccccatctgaggtgtggggaagggatgctgccaggcagtgtggctgtatggggctctcctctcaggtctgtcccacaggccggatgtcagtttctatgcagtgtggtctttcactcttagatctcattaagattcttgagtaagctttccctgtagtgtcctgaggcacaagcctacacattccaggtcaaaggcctacctgggtggccaacatcaagtggccttccgagtccttcctcctcctgcccttccgagggtaggtgcctgctgtccctgtatcaagtccatctgctgtgtctcttgtggtgagtcctttctcaaaagacactgctgtaatttaagaaaagctgaatgtgaaagatgccatgtgacagggttttttgttttgttttaaattagggaaagggatcataaaagggggaaaggggagaccagcttccagagacaggagtggcaagagagaggagaaaggaaagagggggagagagagagaagagggggagagagagggggaaacagacacactagtttctggtatcaatggaactctggggtccttgtatacaaacatacctggatccccaagcaaccccccactgtgtatcctgctaccttgtgagataggtggagaaactggggctcttgaggtgaggtgacctgctcaaggacacacagggtctccaggtccctaacactgttggccctgtgctcacagcacagcctcatagcacacagtgtctcatggtgcccagacatgttctaaaatctctactctgcaagcttgtcctagctactcccaggcatggcatgcagaggtcctagaccaggaccagcctcagcatcacctatgaaactgaaaaaacacaagccccagggccaaaaagaggtgattcttatctaagtccagggggcgtcggtgtgctaactgtagtcacagttccgaaccctgctgtgattacagagctgatgaccacagaaactgctctcaggagaaacacaggccaggtgcccatggcacctccttcccatcaacttgtgtccccctttcacagagctttgcttgaagatgcctagttattgtatgttgttgacccattaacagtgaacttacggccaccagtgaggagaaaatgcctgaaccgagctcatctcacactcggctgttttcccacgagacacacctcacctgcttcttctgtgaggaatgctatacctggtagacatttttaagcagcaaaatcaacaaagggcacaaaagtccaggatgctcagtagattgcaaaagagatccatgtttctggtataatagttgaaacagggagatggctcagtgggtaaaggcatgagcctgatgactcaagttcagtccccagaacccacctaaagctccgggtgtggtggcatgcgtctgtagttccagcactctggtggtgagatgcaagcagtgtcaagaaagtcagcctggtggagcctgcctcaaaacagggtggaagatggggctcgcctcctgaacattgccctctgaccccccccacacttgcactgtgacatgcaccagcacacacacacacacacacacacacacacacacacacacatacacacacagagagagagagagagagagagagagagagagagagagagaggagagagagagagagagagagagagagagagagagagagagagagagagaatgaacagatgctttaaagaactaaagcaaggagcctgcatcctggagcagtcaaacctcacaatatccatgtcctctgtgtgtgtgtgtgtggtatgtggtgtgtgtatgtgtgtgtgcagtgtatagtgtgtgtgtatgaggtgtgtatgtgtgatatggtgtggtgtgtgtgtggtgtgtgtggtgtgtgtgtgatgtgtagtacatgtgtggtgtgtgtgtgatgtgtagtacatgtgtggtgtgtgtgtatgtgtgtgtggtgtgggtgtgatgtgtagtacacgtgtggtatggtgtggtgtgtgtgtgtgtgtgtgtgtgtgtgtgtgtgtgtgtgtgtggtgtgggtgtgtgtcttgcacctggggaaggagccacgcttgcctttaaggatctgttgtctgagccctctgcctcctgactggcagtgggcaatggagaaggcagttgccaagcattgctcagggctgtcagctctcaagggagccacatgggcatctgagagactggggaccctgacaatgccctggcctgactaaggaacatggggatccaggggcctcataacacaggcacaacctgtgacctggctcccactcaccaggcctggacccctacaggaaggactttgtttctccccctatgcacatggaggaagcacccggcctctatagctgttgctgtgctgtggatacccagtgctgccctggctgtggtctctgcccagccttgggtggtccagcaggtgctggtgctccagagctctcagactggcgcttctgagcagagggtgagggaagctggtgacccatgggtcagctgcgggcagaggtcatgcagcggttaacttccactctgctctgggtgggcatccaggtttgtcgcaatggaatgggtggccccggacacctgggacggctccaggaaaagctgggcttttctgttgggcacaacactgggttctccattcaccctccacgcttctgccaagctcaaaggcttgatccagggcaggggtgtgacccaggtttccttcagggggagcaaagccagcatgagctgcttaacccaggatgtcagctgagcaggaggcccagagtgggtgccttccagacctcagaactcatgtgtgctgggctagaaaatgtcccctaagagatagggatgaggcaggtggcaggtgaggggctggacatggcatgtgggtggcctgaaaggagtgtagaacaggtttgcagagccctcaggggagcttgggacaggcagtttctttctccactgcagttagtagagtgcttcctatgccagaaactcgttttgtcaaaggtagttagccaactaagggcccccagcctacctgccctcctatgcaccagggttgcctgagcttccctcatgagacctctctcccacagctcagcacaggccaggtttggaaacttaaccataggcagctggtaaagtactaaacaacccaaacgatggagctccagcttagaaaagaggaccacagtccccgaagcagcgtaaacacagatgccgtggaaaccatatgtactggacttagcaagcagaccgagctgggggaggccatacatcaccatagacgcctctgtgtccttgtgtggctctgatgctgtgatcagacaccctgaccaaaaactactcaggagaaggacttgttttagttctcaactccaggttacagaccatcactgtgggaaggccaaggcaggaaggtgaagaagctagtcacagccatgaagagaatgaactcacgcacactactgctcagctcacctcctctgctcttccttacccagtccaggacgccctgcctgctgtttcccagggtaggtgggtcctttgccccaactaaggtaatcaagataatcccccaaaggccaacaagatctagatagcccttcactagactctctgcccaggtcttccagggtgtcatgataaagcatgaggggaaccttgcatgggggatcttggtggattccatggcaggcaagggtgacctaaggcaagggacaagcgtatcaggcagatggagcttaagtgagaagtctttttagaaagagaagggatggggaagggaagggaaaagagacagagacagagagaggacagacgagaagagggagccaggagccaggagccaggaaaagccctgtctgccccaggggaacagcagggaagacagaacagaaatagagcgttaatgtgcctacgtctttcttttaaaggggtcccttgcacctgggctgaccaggttactgcctgagtgcattctgccaggtgacaggagcaggccagcctgaatccttacacagggtgtatcattttaacaattaaaactatcaaagagctgagagataggtcagctgttaaatgctaggctcacaacccaaacactaaccaccataccttgagcctcgtttttttctttcttggcttcattgatgtggggcatgaagcagagttgtgtttgtcctgtgtgttccatgccctctgccctgtgtaaaaagcttgtcacgttccttatgagatggtgaacatgtgtggtctcctctacgtgggagaccctgggtgtgcattaagaatttagagaagaccttggccacactcagcctcttctccaaattctcccaccatgattacctctgtccccaaggctgccgtataacctccccattatctaccagcccctggggcagaggcagaggccccttgtctctcctaggaggggctgggtctgccctgggatggagatgtcccatgcgtcacttaagtgtggctcagccccaggaaagtgtatggagtgcccatgccaggcaggctctggtgaatcacctcctactccgtgtggtcaccctggctggcaacagaggccctgtgtgtttctgtgtgtggtttctttccattccatgagtcagaaggcaccagtcactggccatgtgacgccgtactctcctgccaagaaactgtggcaaagaatttctggaaaaccctcgaaggacagggagggcagctgtggtcagaaaggggcctgtgctgagagggctggatacaaccttgtgagattagcatctggaaaggggctctggcctcataagaccaaaggctacctgggcggcagcagctgctgggtgaacagcacaaattctagttccctgtggtgatcatttggtctaattataagcagaaagcctttcagtgtgaaaattctggtcaattaagaaaactataaaaaggaaggactgatctgggtgccaccaccagacactttttatttattaatttctttagtgctgggcttttaaaaagggggttattattattatcatcattatatgtgatgatatataatgatgtattatttgggaaatctgaacaaggatagaaagaggtaataggcggagtcagggagatgccatgtagccactggcgagataggacgccgggacattctctggtaagaaagggccatgtgaagagacacagattaatagtaattaatgtaattaatgtaagtaattaatggctgaaaattgagagagagatagacagtaagaagcctaagtcaatggccaaacaattacaaatagatattaagtctcagagtggatatttcatagcagctggggagacctgattccttggaaagaaatctgtcagtgggactgagactagacagagaaaaattttctacatctctgccgacaagaaagaagatgggccccacaacattgatcccacttggttcatatgatgtcaggaaccgttaaacaccactcaagcatcagttttggactaaaactgctctagacaattccagattagctagctaagatgttctaccctctgacaacactctggtcagagcttcagataagaacctcagataagccttaaccactactcagaggccagctaaaatgttacagctggccctctcgagacttaaccattgtcttagttcttttacaggatcccatagaggaaacatcactcacaggacagcgggaagtaattctaagaaaatgatgtcccctctcccaataggtaggatggatataggtttttgctttttctctagattatggataattgtcacctatttagggctggttataagttgaatagggttgggggtagaatatgaagttcagactcaggaatctcttttggaaaagaaaaacggggaatggatgggataggatgagataataggtagattagtgtatctacttgtgaactatttttagaaactattagacaactgaaattgatatagcttcttgtatattgatacttatgtaaaattaatttggtattcctgtcttagataatttgtatattgttacaaatttgaaattatatttgtcatagtgtataggttcctctttctgtttacaatgtttttgtacactaatataaaattaatttatcatattgtatgtttgtgtgttaatacatatgcttaagatattttgtatattgatataatttaggatttttttatcattttgcacaatatagttctatctttgatcaagatatttcagttctacgtctgatcaagatatttacatatgtatgttatatagttacaattttgaggtcattgtcctcaagctgcacatctgtttgaagattgtttattttctatttgggaagtttcagtcagtaagcaatatatgtttttgagaattacgggttatagtcacccatgcttctcataccttgttttgttagtggggttctctagatgctcagagatgcactcagcatagatatttgatcttcaaacacttcaaacactacagaatgtggcattcacatgttttaataatttagaactctgctgacatgagacacaattgctcctgacagcacagaacttttcctgagagttttgatgggcaccggagacactccatatctggagtttgttttcttcttggcaacactggcctactgagcaaagaattgcccttgcctcgactgctgacattggacatactgtcccaactggacaagcaggatataaacaaaaaaagactgctgaactttgccaactcagggtaggacagtctttcaaatttcctgcttttgataatggtctgtcaaatattctagaccttggccaaagttgatcaccctgaaattactctgaggccttgtccaggcagccaggtgtttctgtcatttcttgcacctttaagaagtcccctgctggccgggtgttggtggcgcatgcctttaatcccagtgctcaggaggcagaggcagggggatctctgtgagttcgaggccagcctggtctccagagcgagtgccagaacaggctccaaagctatacagagaaaccctgtctcggaaaaaaaaaggagagaaggaggaggaggaggaggaggaggaggaggaggaggaggaggaggaagaaagaagaagaagaagaagaagaagaagaagaaaagaagaagaagaagaagaagaagaagaagaagaagaagaagaagaagaagaagaagaagaagaagaagaagaagaaaagaagaagaagaagaagaagaagtcccctgactacccaggtaatattattttccttctcaggtcttgttgaggctgaagactagacagtcacagcaaatgtcctctcataccttggctaagacactttagatacaagacatggactcctcaggataggacagctgttggaataacctctctattttttgccagtttgtagcctggacacttcatgatgtgtctctcgctttatgttgctcttgctggttgtaggtctacatctgtgtatgttttttgcctttctttctcctggacaatgcttgatatctgttcctattgtatatagtttttatatcaggtttaaaaccctcttatttagacaaaagggggaactgtagtgggaattccttcccaccagtagtttcacagtcttagggtgtggcttcagtgtctggatgtgatcccctataaggaagaggaggggtcactcactcttgctctctcttggggtgatggtctgagacctgaccatcattctacatctcagcatcctgagcctccaagggcagaagactgtggcggtgctttaccttcagtgtgtgagtgttccctaaataaatgtttgctatttcttaatttgcccttcacttggccactgagccatgtctccagcttctagctttctagctttttagcgttttgagcgaggtctcactatgtagccaggctgttctccaagccacaatgtatctctgcctggcctctgtttaccttaccagactctgttttagcttaccaagatgcttcctctgcaatcaggatgtcacctgcctggttctggtccatcatactgctggccactgcctgggtctggtcttgatctcacctgaggcctgggatactgccactctgggtccccaaggtagtggtagggcacagcctgcggcctcacttcctatgctggctctcctctgctcaacactggctgtgtggactgctcagataaactctgtcacggttctccgagctaagtgtaagttactgatctactgttaaggaggatggtgaggctagagggaaacgttggcacctgtaggtgactggagggctttcagtcacattggtacctgctcaccgcccccatctcaacccgcttcctggtccctgaaggtggtttaaaggctaaaaggatctcaattaagtaagagaagacccttcgttcagaaccccagtatttgccacaccatccctgagggtctgtgagtacctggtttccacataaggaccaatggggaggacacacattctgtcctgggggactttattcctgagatgaactagtctgttccttattgtaactgctgtgtgtgtgcgttggtatgtatatatggttttgcatatatgaatatgcacagtgtgtatggtctctgtgtgggtgtgtggtggcttgagtgagaaatgtcccccataggtactgggatgcttggtctccagttggtggagctgtttggggaggctgtggagcctcggggcagtagagacttgttgaggagcacatctctgggttcggatgttgagagtttatagccttccttgcagcatgggcttcttgctctgtatttactgttaaagatgtgcttgctccacttcctaaccctgctgccacgcacgccgcctgcctccatgcttccctgcaggatggactctaaccctctggaaccataaccaaactcggtcatggcatttcatcacagcaacaaaaagtaactggtaatagtattataatgctgttataatgcataatagcatttagtccttagtgggttcttgtttttcaatacaaggtttctcagtgtagctctggctgtctggaactcactttgtagaccaggctggccttgaactcatagatcctcctgcctctgcctcccgagtaatgggattaaaggcgtgcaccaggtctggctattccttggtggttaactaatcaatatctcaacaagaaatatgctcacacagtgaagcttccagcgaggctggtgatacagttgaagcccccagagtgacaaccagtaagtggctgatctgatttaaagaatgtttgtatcaaggtgacaagagcagacttttaaagcttaacattgattgtcatcttcattgatggatttagaatcacctgggagacatgcctctgggtgtctaaggggtgtttccagagttaatcaacagtgcagtgacgacaccctgaatgtgtgtgtgtggggcaccattccatgggttgaggtcctggatggaacaaaaaagggaagtgaactgaatattagatccctcctctgtccccagcctgtccatgcaatgtgaccagctgcctcctgctctcaacatcctgtcttcccaccacaatggcctgatctttccttaaaccatgggacacagtaagccctgcttcctaagcttctgttgctttcttcaggtagcctgcacagcaacaagctgaggaacgaacacagcggtgaacctgagtgtggataccccagggctgctgcacagcaccacagacagcagggtggaattcaaaacactccctcccaaagtcaaagggtctcttggccgaaccctgtgtacccaggaagtaaaacttgagacccatcctatttctgccaagacaactctcaatgcaaaagaatgtcttcacagccggctcattgcccctcaccctcaatctcggctggcacagtggcagctcctgcagctgccaggggaagagcactttggttgagtgagtggttggcaaaagtcatctgagggcaaattccgagctagcagagctcgggcctctcacaggagtgccacaagcccaatgtcccgaaccctgtccaggttgttgcaggtctctccgaatgtatatcaagattttgggtgccagtctttgggcaggtcagtagcctacttccacgtggtccacaaagggcagcctggggtcagggcagggcctcacagttccgcatgccacgctgtggcaggtacgggcaaaataaagaaaacaacaaagcacattgtaggtgtgttctccccatcccattgccacagttcagcaaggcctggcttccctgccaccacccctgcttcctccagtccgagccccacaaagtgacagctttgctcaagtacagactggaaccaccttctaggatttaacgcctttgcccaactcccgaggctccccactggctgctgcacacgccacactccctagagcagagcccacctgccctgaacttttgcagttgctcctccagcaccaaccaactcccacatcctcagagagtgtccagttccaggctcaaccctactttgccctgttgctttgctgtccatctctgcccaccagggggccccattgtgcagctctgccgagccagtgaggcacagtgcctttcgacagggctgccttcctggctgctggtgctgagatggttggatggctgacagctgcccccaccgtctggccactgaagggcaatggatatggaaagctccagtgactcctggcacatcactggggggcgaggggcttggctgggccccgtcctcttctctcccttgtaacagagctgggcccactacggcctaaaccctcattttaatcttttttcctcactccacaccactcttacattaaccccgatatctgtgttttcattttttgtctattaagcaagtttgcaacttcaatagaaactcagaatacaaactcataactttcccatattttgcttaggtatgcacgacacacacacacacacacacacacacacacacacacacacacacacacacatacatgcacacacatgcacacacacacatacatacacacaccacacacatacacacacacacacacacacacacacacacacacatacatacaaacttatgcatgcactcataactttcccatattttgcttaggtatgcatgtgcacacaccacacacacacacatacatacatacatatgcacacacacacatatacacatatgcacacaaatacacacacaaatacacacacacacacacacacacacacacacacaccacacatggctgtctacgcaagtatacccttgtgtatttgtgggtgtggccaagtcataaataccaatgaaaattattctgttagggcgtaggttgaaactatggactgactcttttttcaagttaccatcctggctgttccaattaagtaatgtcagcttggtttccaaggttatgcccgtgacccacccatccctttaaaccccagctggagcagtggccaggtctccctcctggtgcctggatccccagtgtttctctagacactctaccctgcccctctcctaccttgtaattcggttccttccagacagctactcacactccccccatgctcaggggcttcccttctccagcacagctcctttgctctctgggagctcctggaggggcatgaggcttcctacaacagcaaagtgaatgacttaaagtgacaaaagattctcccattgtcctggaagctgggaatctgaaatcaaggtctctcaggactacacagattgcagcagcatctctagagtcccgtaggctcctggaggctgatgcatgtctgcctgtgctgcaacctccagaccttctgcgctcattggccttctcctgggcactttggccttctgagtcctcttgtttatatggctgggggctaaagccagggctccaggcttgctagaaaactgctctgccaataagttaaaccccttacttctccgcttcacacttagaaatgcacttgtgggggctggagagatggctcagaggttaagagcaccaactgctattccagaggtcctgagttcaattcccagcaatcacatggtggctcacaaccatccattatgagatctggtgtcctcttctggtgtgcagggatacatggaagcagaatgttgtatatataattaaaaaagaaaaagaaaaaagaaacaaagaaatgcacttgtcactgggccactaagggccacatagctaatccaggttctgctttagggaccttaacctagttacatctacagagatcccatcccccccccgaaatcccaggtctttctggatggaaccaatcagctcaccacagcctcccgcatgagggggcttcagagctggtcttcagatccacatggaaagcagaagggaatgacaggataacacctcagctcaggccacacggaaatcctggcattctgggctcatgcagggttattagtcagggttggatgggttatgttgtggtaacaaacatccccaatacctcaggggcctaactcaaaacaagtatgattactttgggctggtacagggctctcctctgatatttcctctttccaggacctgggtgatcaagcagccacctgccagggaagtttctggcctttgtggccagttaaaaactggcgacactaatagttttcatttattcctttttgtttggcccataatacatatctaggaactgccaactatgaccctagaacaaaggttctcaacctgtgggtcacatgaccctttcacaagggtcgcacgttggatatttacgttacaattcataacagtggcaaaactatagtcatgaagtagcaatgaaatagttttgtggttgggggtcaccacagcacagggactgtgttaaagggttgcagcattaggaaggttgagaacccctgctccagatgaacagatgtatgaatctacattttccagagagcaacacaggtttagaaatcacagaatcagacagctttgagatgacgtcatctgatgatgtcatcaaaggcccacctttctcacccgggtctaaccagggcactggttaaaaaacagaattacaacaaacatactagacagacctaattggctttcattaatgaaagcatcaaatagaggccactccatttaacatcagggctttgtaacatggctggagcaggaacaaggaaacagagagacagcaaagcaattgcttaaatcgatgcagggaaagcagaactgtctccttatgacaccagttcacagggactctttctggtgagctgctgtgactctcctgtagttgggacaatctagtcttcgggggcagggtggggcatgtcctctgcttcttggtttctgttcagttgtgtagctcttcccataagtggctccattttggtctggtttgctgggcatgatccaaaacaatgtccttctatgcatcttatttaataccaacatgggttggaggccaggcatctagaaactcacagccacccatttggttagctgtcatcaatgctgtgacaatatactgattattggattcttggccccatgctgaaggaagctagggccagagccaacacttgagacaaaagcaggccctgggttaagcttgggacacacatgggcccaagaagaccaatggcttcttgtaggaaggtgcccttgggacaccccacacagggaggaactggaacaggaacagacaaaagtcagcaggtgtcctctggtgaggctctcctctgtcctctgcaagtgacctcctgctggaatgccccagggagctcacagatcaggaagctgcagcccttcactgcttttctggggaaagaggagcaaagacagggaggtgtggtcttgcctaatcacctgcccagcactggtggctggagccactaggatacacccaacatgaccagggagaatatgtggatgctgccatcagaaaggaaaaggctggagcagggagaggaaggaaaaaccaaccacagcagtctccacagggcaagaaaaatggagacttcagtgaagatggtgtaacgggatctgtgtttgacccttaacctgtgggggtctccataattcttggtagtgtcacacatgaccaaattaagctaatcttggtggtgtagacccgtaatcccagctatttcagatcctgaggcaggaagattgccaactacaaaattacctgggcaacttggggcaggggtggctggggtagggctgggatggggctgtagagatggttcaaaggtaaagagcacttgctgaaaggaactgagttcaattcccagcacccatgctgggtgattcacagcctataaatccagctttggggatccaactctgtcttctgtcctcctcaggcactgagcatacatatgtacagacaaagcacccgcccacacacataaaaataaaacttaaaataacaaagtaaactgaggatgtagctctgtggtatagtgcttgcctagtgtgcaaggccctgttctgtgtccctatactcaaaaaacaaactgtaggacacatagctggtgtgggggctgcattaaacccctcacattggctttaatctgtaaataaaaaacctattttcccttcgtgtgtgtgtgtgtgtgtgtgtgtgtgtgtgtgtgtgtgtgtgtgtgtgtgtgtgcgtgcgtgcagaggccagtggagttatttacctggttttattgagacagggtctcttactggcctggaaatgccgagtgcattaggctggctggccagggagaccctggacctacctgtctccacacctgtctccacacctgtctgtctgtctccacacctgtctgtctgcctccacacctgtctgtctgtctccacacctgtctgtctgtctccacacctgtctgtctccacacctgtctgtctgcctccacacctgtctgtctgcctccacacctgtctgtctccacacctgtttccacctcccccgttctgaggttacaggcgccttctggcatatccaacttatgaaaatatgagttctggggaccgaacccaggtcctcactcactttaccaactgaggtgcctcctcagccccccccattttctcttcttcatgtattttattggttaactaaacaatcttacttgagattgctgacttacttgggttttcattggagcttaggtgagattttcttggactaaaggtttttagtgccaaaagaattgaagctggggctgaagagatggttgaatagttaagagcatgtgttgctcttgcagaggatatgggtttagttaccagtgcccacatggtggatcacactatcagttattccagttctggggagatctggtgccctcttctgaactcccagggtaccaggtacacactcccaggaaacgtacatacaagctgacaaaacatgcacacatgtaaaataaattaaataaaacctattttgaaaatgtgaaagcttcctgccacagctgccatcagagaggcacagccctgtgttacccccatggctgtggacctcaacaaggaccacaaggtgatttatgccatgggcaagctggcacagcggacatcttaccaaacgctaagtttgtgtgggacatgatcgtcagctgtgtggctccttgccttacatcatgccttggagccactcaaggtgtccaaggacaagaaggagcactcaagttcatcatgaggagggaggaggggctgagcaacgtgctggttggtggccctgaggaaagcactaatgttccctctccccagtatgccatccattccccagggggactctccctctcaatttatggaggagatgcagagtcagccagaccacagggggagggtggcacagaggtgggaagaagggagctgagctgaggctgactccccgttgagcagtccctgtcagtgcaccggggtgcagcagccaatacagcttgccttgactgtcttttctttttcttactttgataaggtgagctgatgagccaagtccctgagcccgggatgttagggagggtcctacccaaagcttcctgtttgggtggaagagagagcaaggaccaggagccaccttcaagcaaggtcctccagtctccttctcaatgccagcccgtgacaggagcatggcagacagaagttaagagagtatgaaggaggaagttcaaagggctacacgcagtctgctttagcaattcccaaataaacatttatcagaggtgaggaacctggaggagtctcaaggcaggggtggggctgcttcccaaggaaacgggaagagtaaaatgagatgtctctgctcacaaatgctggttattataccttcccctcctttcatcactagggaaactggtttcccctcaaggtcagtctgttttgcaaactgggcctggctgtcagggagcaccgtggactccccatcctagctgtgaggctgcctcatgagggagacagcctaaagtgttctcatgaggcacacatacggtgggacccagccatggtgtcaggatcctggtcacgatgagttagggagtgtacatgtgaccaagctacgatgggcttagtggtcagttgtgtgggctgtggacatgaggatggacacagtctcgtgggagcccagaacaacagccccagtgccagggatgagcacgcctaccacaagtgtgcagaaaacaagaacgtggtttctcttgctcctactgggagcccaaattagagctctgccctttgtccctcaggagtccaggaaactgtatgtgggtgttgtgaccacaggcctctttgttcctcccacccacacaggcccctctgtcactaggctctgaccttcggcccacatcccggcagacccggacagctggtgaagttgacttcagctttgtcagagcagcatgtctggagcacacggtgccatcctgatgctgccctgggggcatcaaaagctctgagtttccccagcagtgaaagtgtcacccgagcatctgaggcacaggtgttttgttttgttttagacagggtctttctacaccactttggctgtcctgaatgaaactcactctgtggaccaggctgccctcaagctcacagaggttctgcctctgcctctctagtgctggagttaaaggcgtcagttaccaggtttttaagtcactaatcaaggctctgggtgggtagcgctgggcctcttccatggcatcctgggagcgttgtgtggtgcccaggccttggctatggcacactgggccttctttggctttagttatgggcagcctggtgggattcgggaagggggggcaggatttatttcttcattgggtgtttaggttgtcataggttgatagctgattgtcagaactcactccacagcactctgacactgggatctagaagtctgctcaccttcccgccttaggggtgctgagccccactcacagctatgtgacatccatacggaatgctctgattacaatgtgccgcctagaggcttggagcaacagctcagtggtcaagagcacccactttacctcagaggacccaggtttaagtctcaaaacctaaatggcagctcacagcccctctctggcctcctcagtcactgcacatatatcacacacgtagaataataaagtctgatatatacccatgtagtgtgagggtatattgtgtatatacatacaacacaccacacataccacatacgtaccacacacacacacacacacacacacacacacaccacatacatcacacacacacacacacacacacacacacacacacacacacgcgcgtgcgcgcgcgcgcgcgcccgcgcacaggcaaagcactcacacttctacagcagtactaacttaggaggtgagcagcaggtaagcattgcttcactctgctccgcactgtgcgtgtgagctcctgccttcacgtcctgggaatgaaggactgtcacctggaattgtaatccagatacacgtttcttccctaaactgcttttgatcaggacctcttgtcacagccacagagatgacgctaggacaagagagagggtgatagccatggccagggcagccctcgtccccctgcaatcccatggcctcacatatgccacactgagttcaggaacagagagttctggtccagtacacagaaccctgcctcttcccagacagcgcatcggctccatcctggctttcctggctccctgacagggcttttccatgagtgccctgccctggcaggccaggcgcttcctgagcccccgcagcctctccccttctcttccttcccactccccatagggtccaggacaggatccacacaggctgcagtggcacacacgggatacccagggttccctggacgggactgtaagaaatcccattccttcctggtgcagcatgggtaagatctgacctgcagactcctgcccatccttctgagtttacacaagatctggctgtttacccagcctgcaccaagcaggtgagatgcctggggttctgggtaatgggacagagagatcagtgtgatccagacctgaccaagcccacctgtccagagtctccatgttaccccttgttttctagttcctatggtgactgaagtgcagagcaggacctgttattgtttctggaagaaaagggaagggccagatttgaggactgacgtctgtctgccaacgggcagctgagtcactgtgccatggtctggcgcctccgtggaatcacttccccatggtctcaggctccttctgccttcccccccttagcaagagcgagttccctgtccatgtagtcaacagcacacaagccagggcacctgcagtgtatatacagagccgtgccctcggcactatgggtggctagcagggcagggaaggacattagtgacagggccaccagtctgctgccacagaggaagagctggtgggcaggcccagacatgtccacaggccggcctgatctagacagtccctcacagatacactcttcccaggtggctctaggttgggtcaagttatagatacaaccaaccatcctgggactggagagatggctcagtggttaagaggatttgctgctcttgcagaggacctgggttcagttgtcagcacccacacagagactcacaatcacctttaattccagtcccaggggatccaacacctcataaattccaacggcaccaggcatgaacatggatgcacatacatgcatgcagaaaagcattcgtacacgtaaaatataaaactgagcgtctcaccatgctttctgatagctctgggggaggaaatggcatgggcttcttttttctctattaactactgaaaaactattgtgcacattccttacacaaggtagtgctctagttcccaacacactgtggaatgtcccacaacagcttcaccctgatgtccctcccagctttctctaaacaggtgcatagccacaccccacacactcaccaaacacccccgcttccctgaaatataaacattattccagatttaaagccgctttttatgtccagactgctggccgtgtaggaggagaagcaggtgcaacttacatggactttctccatcctttcttgcagccaccatcctggccctcccctttcggtccctctgcatttatcccgagacttctggctggtgccaatccccctcctgctatcagcaggcacaccagggccctttatgcccctcttctcctgggactggaatcttcccggactgcaggacggctctgccccccttctccatgaattcaggggcaaaaatctaccctaccttatgcttgtgttgcaatcagtgagtctatgtcatttcatacttaatgattctacacattttctttgcatatgtatgcacgtgtagcgtggtgtgtgcctgtgagcatgtgtggtgtgtgcctgtgagcatgtgtggtgtgtgcctgtgagcaggtgtgggccagaggaggttaatgttggctgtcttcctcgactggggtctctcactggaatgcagagctcactcacacagccactctagcttgccagcttgcactagggatccctcatttccatttcctgagtgttgggattatgtttatatgcagagccaaactctggagctggggagataaatggctcagtgcatctatctccccagctccagcacacttggttgttttttgtattattattattattattattactattactatatgggttgtatgttggggaggtcatgtgccagagagaacaggtgagcatggctgaaggccccgtgtgaatagggagatgggggttggctcctgtaaccctccagaccacacaaagaactagactcaagggagttgctggagggtcttaggcagagaatggtgctcaagtcttgagccgcttcttggtagcacttatttctattcgtgtgatggtaaaattcagagggagggttggctcttgcccaagttcacattcaatgaacatattgaaaaagagttctagagccaaagagccacagccagcaccagaggcaactcttccccttgtcccacccatctcaagtgcctgtgctcagggaaggggagggagggagagcacacagatgctgaacttgtaggttacattacccgagaagttgctagccatatgacttcactgaccccacctcagacctaccaaatggtaaactcaggtgcctcgggagtccccaggctgtatcctcttgaaccctctagggaactctgtgaacacaatgcttgagacctccagagccacggagggattgctctttctcaagccaacctggccccaaactttggcctgtgtcccttgcctggtcctccttaggaggccatgaggggccatgcagtgagtcaggttgtgtggccagttgagatgctaggggacatcaaggtgccagctttagtcttttctacactgtagggggcttctcagctgatcagcccaaaccctgccttccgcaggcctatgaaatgattcacccaggccacagaaacagtatttgctgtctggttgccttgacaacgtttccagatcctattctagctttactattaaccaaagacaaacaactcaaaagccaagcagcaggaatgacgaaacttccgggcggggcccccgggaggccatgaaacacctgggcaataggcaatgtcgatatgatgtcatgcagagaaatgcttgctcatgggcaaaggtgatcatgtgacctggcttgagtgccccagtcacatgaggggaggtgctctccactgagctggggttcctaccagagagccaaacacagacaggactgtggagtcatgatgaaatccttcactcatgtgatgggatctttcccctccccaaaggtttttttagagcaaagactcagaaccagggccccccaggagttaggcctgccctggctttgcctgcctagctgtgtggtattaaacaagttgtccaaactctctgagcctcagaaatgtataaacagttcataagtataaatttataaaaaatctgctgatttataaatagagatggaaattgccatctcacagggttgtttagaaaatgaaatgcagtctgaaagagataatgaaacctctgtgtgttgtaacagttccctttgttcctgagatgggctaaagcttttgcacgtagtcttaatcccagagcagattaaaagtggtcagacactgggtgtagtgacgcacgcctttaatcccggcactcaggaggcagaggcaggcagatctctgtgagatcgaggccaccctggtttacagagcgagttccaggacacgtagggtgacatagtgagacctgtctcagaaaccccaaaccaaacaagaagttgtcaggtgagagctcttcaaggaaggctcaaagaggggagggaaagctcaacacaaacatttgaaggtgagggaaaaaaagaactagaaaaacaaaaacagacacaaaaccaatatggcacccagacaggtaggtgtggggagagaagatgacagaaaaacatcacaagaaggcagaggcagcatgacacacttagaaacacctcccctccggagcttgacatttaaaagtattgttagtgttgttgtcattattagcattgacacagggtcttactgtgtagaccaggctggcctcagattcactatgtatcaaaatcactgtgtagaccaagctggcctggatgcggagatcctgctgcctctgactccagagtgttgagataaaaggcttgcgccaccacacctgcctaagtttaacactttaaaaagcaaattttataaatttaaacaggaaagttttcaggtgtccaggaaattcctatgagatacttctaatggattacctggggttttgtttttcttctttaaaaaaatggtgtgtgtgtgtgtgtgtatggtgtgtgtgtgtgtgtgtgtgtgtgtgtgtggtgtgtgtgtgtgtatggtgtatgtatgtgtgtgtatgtggtgtgtgtgtgtgtgtgtgtgtgtgtgtatgtggtgtgtgtgtgtatggtgtgtgtgtgtgtgtgtgtgtgtgtgtgtgtgtgtatgtgtgtgtgtgtgtgtgtgtgtatggtgtgtgtgtgtgtgtgtggtgtgtgtgtgtgtgtgtgtgtgtgtgtgtgtgtgtgtgtgtgtgatgtgtgtgtgtgtatgtggtgtgtgtgtatgtggtgtgtatgtggtgtgtgtgtatgtgtgtgtggtgtgtgtatggtgtgtgtgtgtgtgtgtatgtggtgtgtatgtggtgtgtgtgtgcttgtgtgcacacgcacgcgcgtgaaggtaggagggcaacttgtaaaagttgtgtctttctttcctccatgtgagtgcagtgacttgatctcgggccaccaggtttagcagcccctttaccagctgcgccatttttctggccctcagctgtgttttcactgcacttcctatctaaatggcaaagcgtggtgcagatcagacagtattggagtccaggtccttgcatttcacatttcagcttttcagctccaatttatcttgaaacagaaatgattgtgtccagctctcctcccctaaacccactttttctgtattggaatacactattataatgacactattatctaccacaaacagtaactaaaacggtgagattagcatggcagggagggagttatatgttgtttttgtttattttgttttttgagacagggtctggctatatgattcaggctcagtatggctttaaactccctacataatctagactggccttgaactcacagtaatccttctgcctcagcgacctgagggctggcatgacagttacggtgctgttgggacccagtctctttgcacactaccttgtaaggtggggttggttatttcagtttccacatgtggtcttgagagtcagtgggttatagtccttgtctcaggtcaccgtgccggagtggtcaaccttttggcattgtaatatgatattatcatctacaaagtttatactcaggatcacacagttaagtcacaaaaaggattgtgaaaatcccccctaaggttttcagtaagtctgtggttttgtgttggtcacactcatggccgtcctcagtcacactgcaggctgggctcaacagagaaagtgtagatgcagcccactgacccttagtacctctaaatgcagtcccagattctacccaaagggggcgctcagccatagcctctgtcaggccaatacctgaaaccctaggctctcctccactctcaggcaggacacacctgtgtgtggtggggctgggttcacagggtccttccacattgttgggtaaggtgtgaccttagccacaggacacccagagttctgctgcaggccatcagccctgggcaaggatgtacccaggactgctgctcacacatctgcttccatccgcctgagcctcccagaaggccagcatcctcagggatccctgaaggggtcattctaagcaatggtccactttgctaccttatcctctggtgccctgccttgccctgcatctggagtatcaactctgaaaatttccccttcagtttttcattggactttttaaagttataaaacagattaagttattttcagaatgaatacctaagtaggcactctctgtttaaaaattcccactctgagcaatcagagactgttctcctgaggacacctgggacgggtcatggcaggatactgggaacacagagattccctgagggcctcccttcctctctgtggagcaggccccagctggctgtgaggctggccgagaaggaagtctggtagatttgggactatgatatctggatgctgctgagtgatcccaggtgagtcactgagtggctttaggtttcattttctttttctctaagatggaaactgggcttgctccctcaatttcccgaattgcatagcacttactaaaggccacagtaagtgagtccataaactcttgtctattatctcaactgtgacagagtaccaccgccataccacctcaaacacgccccaccctcacagccgcccatctcttttctttattagagacctccattgtttacttatgggagctgtgcacccagataagaaactacacttcccagactcccttgcagataggattcccctgatcactgtgtggtgaagtgagatgaaaatagacattgctcagagggcttccgagtgagcactttaaggaggctcagctggcaagcacctttgccctactgttctccttttctggtctggaatgagggtgtgatgtccggaaccatgaccataaggcaaccctgaaaacagaagacacaccgcatctgaagtctggtagaacggagaggaggacaacaggagacacacggtgtctgaagtctggtagagcggaaaaaaggaaagagcctggcaaaccaaacacaaggtggaggaccaccatccacttcaggtgttctgtaatataagaaatgaagaaaccagccatttagtgccaccattttggtaagttgtaaaccagtcatttagtgccaccatttgggtcagtgtaaaccagtcatttagtgtcaccatttgggtgagtgtaaaccagccgtttagtgccaccatttaggtgagtgtaaaccagtcatttagtgccaccatttgggtcagtgtaaaccagtcatttagtgccaccatttgggcaagtgtaaaccagtcatttagtgccaccatttgggcaagtgtaaaccagtcatttaatgccaccaattgggcaagtgtaaaccagtcatttagtgccaccatttgggcaagtgtaaaccagtcatttagtgccaccatttgggtcagtgtaaaccagtcatttagtgtcaccatttgggtgagtgtaaaccagccgtttagtgccaccatttaggtgagtgtaaaccagtcatttagtgccaccatttgggtcagtgtaaaccagtcatttagtgccaccatttgggcaagtgtaaaccagtcatttagtgccaccaattggggaagtgtaaaccagttatttagtgccaccatttgggtgtctcctaaatgtggctggtaaagacttgctccccagaagccactggaaggcttcagaacttttaagaggggggacttagaggaggtcttctagtcactggagcatgtctttatgggggacactgggaactcaagctccttcccctcttctttctttcccacaggcatgagctgagggacctgccacctgctcctgccacactgtgtccctggctgtggccccaaagtcacggggccaaccagccatagactgcagcctctatagacaaggacaggaattagtggatagtatgagtgacaacagcaaacacattgtcacaatacagataacagtacagataagtcacatcgaagacaggaaggcacctccagcctctacctgtggaccctaccaattacagaccgaaattagttcaaaaaccccatctttactgaattggaagttcagtttcattccctaaagaacatattcaacaactatttgcacagcattcacattgtataggctttgtaagtgctctggagaggctctggaggtatagactacataggttatattcaaacaccaaaccatttcatcatgtaagtttagtaggctcaatgggtcctggaagcactcttctcttctggagacatcagggacaactgtctgtgaatgaatgagtgagtgaatgaatgattgagtgagaagggacagagcttcctgtctacagagtgtcagcatggcggaaacagattggccgctcaacaagcacagcaatgattattttgaggaggaggcatcaagggaaacaaacatcgtgggaggaaatgtgatgagcagcaggatgtttgcataacgtcgatgtctcctcgtgagacacttcacacagcaagggggaaggcttggcagacaccaccgggctaccagagttactccagcaataatcaagctcatgggccatctgctttgagactctgggatcaacataaaccatgaagttccagtcaaaagtgtccaggtatcagccagaacccaatgtaaggactgcctacaaatgaacaacccagcaagcacttttcagaactatgaggatctctgaagagtcagctgtggtgcaatctcagaccacagaccaaggaaacttagtacctgaatgccctgtcgatgcctgatgggctcacaggccagaagctgacatcagtggggcagtccagcagaattggaatgttaggagctcatgttaatttcctggtatttggtgactgtttttatgtacggtgttgggaaaagatgatgaaaagtatctgggaattgtttataccattcacgaaacatctgcctagttttgtgtcctggttagggttattgctgagataaaacaccatggcaaaagcaacttcaggaggaaagggtttattaggttgacacttccaaatcactgttcatcactgaaggaagtcaggacaggaactcatctggtgcaggagcctggaggcaggatgcagaggctggggagggggctgcttactggcttcctgccatggcttgctcagcctgctttcttaagaacccaggatcacctgcccagggatggtaccagccatcaatcactaataaggaaatgccctacaggtgtgcctacaacctgatttccgagatcagacgagataggttgctttcagggtggtatggccttagaatataacctgattttatggaggcatgttctcaaatgaggctccctcctttcaggtgacttgagcttgtgtttaaaaaagctagccaacacagtctgcgatctttgaaaaacaaaaccaaacctgccctgttgggcccagattctcagtctttccaacagcagtgtgtggagccagccttcacaggttataccccgctgtggggctgcagcgctgccttgtttgggcctcatctatgaaccctttgcatggattctggccctgtctctgtcttcaaagctctcttcagcccactttgcttctcaccacagtaacagattgttgtttagtgagttgctcacccaaatcccagaagtcaccactaagacctctgtttttctcattctatggcatgcccactagcaagtcttgtgatctctctccatctgttctgtgttgccgcaacataacaccagagtctgggcatcttataaggagaggtttgtttggctcacagctctgaaggctggcccgccgtatcttctgaggttcttactgctggtaagggactctctacagcaatcttgcctaatgctgcgaccctttaatacagttcctcgtgtgtggtgaccccccaaccataaaattatttttgttgttacttcgtaactgtgattttgctgcctttacggatcgtaatgtaagtatctgtgttttctgatggtctgaggagactcctgtaaagggtcatttgaacctggggatccaaactcacaggctgagcgtgcgctataggactctaggcggcatagggcgtcacatggcaaaatcatagggcatccaagagagcgctaaactggcttcttaacagacctcttgcgagggaaacagaagcccgtgtctgaaaggcgtggtctccagtcttggtgctactgggcagaggtggatcctagcggggaggtcatctgattaccacgggcatgctctctggggggctgttagcacccgtccttctccttctgtgctctctgcctggctgccatgaggtgagcagctttattccacctgcactaactacccatgatgctgtgcctcatcccaggcccaaaggcaacgggccaagcctctgaaactatgcgcccaaatgagcccatggatgggctaatctattaatgaggaccaaactctcatgacacagctccatatggcccctggaaatacttcccagtggagattgtgacatgaggttttggtagggacagtcaaaccatagcagggatgtcctataattcattactgaccaggccacttcccatcactcctctgccaggacacttgccaaaccataaattctaaaggaatgtgccccttgccctcctaaatgttttcttcttttcagccttcaagccccctttccctgagggaaaactccaaaggggaaagctggtctcagatcactgttatgggccattccctagcctggcccacagcagacacccgtgtttgagcctctgagtcccgcctgtcctcatgagagcctgattggctacgacctgtccaggtggtccttccactcttgtgggcacctatggctgagggaagagagggaacaggagggtgtaagttcttgcttctgagcctatgatgactctgcagggccatttctggggagcttgctctgacccaaccctgtgtggcaacagactcctgcagccacccccagagaagctgagccaccactcactcctcttacttcctgatttgatactaagtacagacaaagctttctacagacgcacgcactgagaaaccagcagggctaaaaataccccctttctccatacctcattccttttttctaaatttataactcaggagactagaaattctgtcagaatgtagtgacttctggctgtgggcaacaaggggactaaaagacagaccttgcctgagacactaggagaccgttagtgtgccatgctgtttgagatgcctggcagtcactcacgggaacagcttaacttgacaatttgaagcctatttcccctgctatcccctggaattcagtgtgatacatgatgagcggaacccggctcccaggcaagatgtccaggcacatctgaaccattctgtcctggtcattccttcactcagagatagtcactgggcacccacagtgtgtcagataaaaaaaaaacatgccctcttaggagcttgtggtccatcagaaaagacaaaataaagggtatatggcatgttaggatgggttaagtattgctgacaaaaagaaagggcagaaaaatgggtggggcataaggaaaatgctacgaacaaacccacaggtggagcttgccatgcacacacccagaagacatgctctgagcggagagaggcggccacggcccaggtgtggaagtggggtagactggagttcttcagcccatcgtggctggttgcagtgagcattcgccactgcggtaggagccacacaggccacagcgtggacaccagttcttactctgatctgagacatggtaccatcaggaggggcgtgagctgaggagaaggctgagttttgacagcagagggtcaggctgctgagttagttctttggattacagaaacacacggaagcagggatatgttaagggttccacaacaaagcaggcaaggggctagctgtggctcacagcagaaatggcaagaggggttagcatcggaatccatttgcagggtgaagggatgcgggcatgggagacacagaagtcaactgtgcggcctgagcagtgatggcactgccaccattgactgtaggaggagaaaaggtgaggacttggcttcacacctacgaggatggtgatgctctcagacgccctaaggggagccagcaggtgggggagggtaagcgagctcgataggggtctgggctgcagtggcccatatagcccttgctgacagagagcaaggcttggtgagttcaccaagatgggggggggggatgagagggaaggcccaaagtgtagcatgaattctaattgttcttagtaataaaaacccagtgtcagatacgggggtagatgctgaaagatcagagaagtgtaaaggagcagccactagagagactttttacctctaccaaatcctcacaccaaagtgggcaagatcctgtgtctccacctccctagtgctgggattaaagtgtgaaccaccatcacctggctcttttagagcaatctcgtgtagcccaggctggccttgaactcacagagatctgtgtgcctgtgcctcccaagtgctgggattaaaggtgtgtgtcaccactgcctgccctctatggctaagtagtggctagatctacactctgatcttcaggcaagctttatttgttagatcataagcaagatatcaccacacccaagtgctaagcactgggacatagctgtattcagagagcagaggcagaagggctggccggggagctgctctctgactgtgtctgtgcggcaaagccccatgcatcaatttgcagcccctgtgctaatatgcaatgctccactttacagtcctggaattatgacacagggcaatgtggccaaggagaattacaagaatttagaagggcaaaggttactgaggagagacagaatcctgtggtgttttgaacagagagggagatcccatacccatgaagacagcagagatgacatttagaacggggaaacttgcacaagggcctggagatgaaattccaaggaggaggaaactgaagggcagagggtgggagacagcaagccattctttctggctgtttccataaagcgggggagtagatgcaaagcttggaagcaaactgtagaagctccagagtaaacccacagtttttaggatctccactcgggtggcctctcatttggtgagcagcaggacagagggtttcttacctgggcttggtaagattcccagggtgtgtgcttgggaacacatcatcaccctcagtttatgagtggagagatgcactcgaagtcagtgctcacatctaagcttaggaacaggctgaggcttgcaccttgactggaggaaatggtctgggattggaggtgtcgctgggacctggaaatggagaattacaaatggaggaggctgcagtgagctacactgagatgaaaggggtcagagggcaccgtaatgatggaagggtgggaccagaagaaaagagcaaagacagggttgggatctggagcttgagtagagggtagaagagctagcaggaagagaatcactcttcctggcaattccctcagctacactgatctccccaaagccaaacccaggccccagtgcaagggaactactgtgagcagaacagaaaaacacaggttaaccacagagccaggtaagtgacaacaataaaagctctggattggctgggcattggtggcccatgcctttaattccagcactcaggaggcagaggtaggggatctctgtgagttcgagaccagcctggtctacagagcaagttccaggacagcctccaaagttatagagaaactgtcttgaaaaacaaaaacaacaacaaaaagtctctagattgcctcagatatagcccatgtctcaattgtctccacacctctgcagtagagaaagcctgtcttagaacaagccccggttgacctccccgctaacagtagcagtcagtgaatctggatgacaccgatgggagaacagtctcctgataccagctgaagaattatgaggaatagtgattttatgcggcagagtctgggacttgactagggtatgtgtgtgcataagcacccattctaggaggctgggaatgcaggggcagccagtctccatcacaacagtctgagctgcacagagactgtcttggtgccgtttacagacatgcacatacatacacatgcatacgtacatatatggctgtttacagacatgcacatacatacacatgtatacagacatatatacatcaacacacaaatatgcatacacatacatacacactagagaccaatagctcctctaagttctccaaaagtcttagttcagttaaccctcatgacaacccatgagatattacttccattatataaaggggaactgaggctcagagtgattaacttgcccaggatctcaaagtcactatgtggggtcagaactttgccgctaggcctggactccacatgcttgtcacttctttataactgctgcctgccaggggctcttgttggtgtcactgtgtgcttagtcctctctaggtccagttgcccttcctgccccattgcccttgacacttggacacagctgtgctggccccaggtatgtctctctcatgacacaagtaccttagacatgactctcaggagtgcgagccatggctggggtcagcagccaaccccagagcccagctcggatgctctcattcaaggtaagaccttaacgagttcctgaggttctagaagcctgagcttcctttctggcaaaatggagcagatcaccaatgtgtggcagcaaggagaaagtggggcaaagtccttgaggccagtgacacaggcagcaggacacagggtcactgatctctcagaaatcacagtccatggggaaaggagactcagtaaacacaggaggaacggagtgccaagtttcactgtggcccccatggcatctgtaagaactaaatcagaaactgtttgtgccaccatttcaagtgtctggtggcttgaccttcaagagattagtggcgccttcatcccagcctgtcgtggatgaagtctcaagtgtgtggctgggactttgaggtccccctggtgagtggaaggcagggcttgtcagtaaggcatgggtgactttgaagacctccagaaataaaaagcagcttttcttcaagacttcagcatttcactggcaagggtgcccttggatgccgttgggcctcctggtcatggagaagcccagtcactgggggtcatggagggtgtggagtgtgtagagggagctgggctccaatgggccaccattccactctcttgacagttacattgctgcttctgccagcaatcactgtatagtgaccaccactccacagtgggatgcctggttcctactcctccagggataccaactgactggccctctctcgtaaactcactgtgaggactgagataaaatttgtatagaagtaccctgttttatttatttttaactttagacagttatgtatagatggatatgcttattttttaaggcagggattcatacccaggccctggttgcctgctgccccaagcctctcttacagagagttgtccctctaggggccagaagggccagagggacaactctctcaactgaaggtaacttatctcttaggggccctgggagtttcctgtcttccatggattctgaaccttttggacatggcaccatcatcatcataagacagtgtctctctacacagccctggttgtcttggaactcacgaagtagaccaggctggctttgaactcataggaatctgccttcctctaactccctagggccgggattaaaggcgagtgctgtaccatgcctgattacatcactgttcttaacaagaactgcaaagggcacaggtggtcactgtggacagctggaaacatctaggatgtggctagcatcctagagtacagccctacagacttcccccatttggtacctttgatgaacacttatgtatactcaattaaaccagaagcccagcactcagcctctggacactacagagaccaggtgaatgggcacagaatcagagtgggctactcagagcccaggcctgtgggaggtcaggacagaacctttctgcctgactccagccctcagcttggcctgaagcaggactctgcacgcgatgcccatgctcaggctgctcctggtccccatgcatggggcagcttgttgtttggggcgattgtgttggaagcaaaacctgcaggcatgtttgggaatgaattaggcctttgtgtggaaagccactccgctatgacccagcttctggtaatcggctctaaaagccgagtaacagccgaaatatggaaggagggcgggacctcgcagaacgcctccagctgagcagcactggggctcactgaccacacagggtggcactgaaccaggctctctgctccacttctctccctctttaatcaggtgcccttgattccttccaaacctaagacagtggagtatgttctgaccttcccgccaaatttctcacaaatcttaatagtcagaatgcctatgatttgggggttacatattctgtgccagcccctgaactgaacagaaattatatttaatcctcatcttgcttgggtaagacagataaaactactgctcagccagttcagtgactcactcgggctctgctaccaccgagcctagaagttaaaccagcaatctagttccagacactttacataaaattgtttttgtttcattcgtacatgtatgcgtgttgtgtgtgtgtgtgtgtgtgtgtgtgtgtgtgtgcacggtttccccttcttctatccccacctacacttggtctcagattgggagtgagggagaaaatcagacaactggaggggtggcccatcggcctgactgctttccctcatgctcctcctacagggagagtctgatgggtttctgaacagttcagctgaaagggcagagattatgtctcctgctgagttctggagagcagggagggcaacaggtcaaacgattctagctgtttggagctggcaactcatcagcactttacagatgtgggtgtggagggagtcacagagaggtcatagggtttctgcctcaggccctgctgggacagatccctcattggcaataccgaggatagggaggggtagggtttggtggctggtagttaaggttcaattcctggctttgagcaacctcaggcagagtctttaatcccttcaggtgctctcccccttgtctgtggagtgaggataatgcctgtaatttggtagaagagtggctttgagcagagggccagcacacagcaagtgcccctgaacacagctgttggcgttctgcattccagtcagagccaccagcctttctggctcactgcctgccttctctcgactcctgtccttttctttgtgatcaaccctcttgctgtttctcttgaaggctggataccagctggtactcctatccctgcttgacagtgtagaagctgaggcaaactggaccagttcccctaggctcaaactatggcactgccaggctttgagtgtgggtcagattctaaattcagtctctaacaatctgtaagtccatggtcctggaccagctgtcaccaagggagacctagatgtggccaagtcttactgtcactgaattcttcccaagcagtctactgcctggactctgaacagttgccaaatggtacgcatgggaaggaggagaggatacaggcgatgcagtcaggccttggcctgctgctgaatgtccttgctatacagcagacttggtgcaggtcctgaagctgtaagatgttgtccatatgtaaagctctgcactcacctgtccaccccacccatgcacactctctctaagcacaggggccctgccttgttttcctgaatctccttcagtcaccagtgcccgcccctcaataacatcgggttaactagttgacttgcaaacagccaggtcagaagacaaaggctccagtgtacacagcaggaatgtgctgggctgctgaagcttgagaggaaccagaccctggtctgggaagcctcctgtggagggatgggatgggctggagttggctgagaactcttcactccgtttttatcacaattaaatgcctactgtatgccatacactttgccaggctcaagtggaagaaaaggtctctgcccagctgcctgtactctacaaccacagagccgtgtgtcctgtgagacacatcagaggcagaaagggctgaggtaaccacggtcacccagcctggtcaatgagagtgagcgagcaaaccagggaaaacacatcgggacaagaacacagacactgcaaaggcccaggatgcaaaatgccaagtggttaggcaatgataggcaggtgagctgctgaaccagcaggcagagagctgtgcaatacaatgggggcagtgccaagcagcgcccgcatcccaggttagagaacatggccattactcagagctgcacggtgaccagtgatatgtgccaatcagctggcaggatgcttgcctggcatgaaccgaaccctaggttttccatcaccagtaatagaacaggcatgatggtacctgcctatgattcccacttgggaggtggaggcaggaagatgaagagttcaagattatcttcaacgatataagtttaaggccagtctgagctacaggaaaacctgtctcaaacaaacaaaataccaccatcaacaacaaccaaaaacaaattcagaatgctcctcagtcaaagaaactgagtgactgaaagaaaaagaaaaagaaagccatgttcttggttgaaggtgattttgccccaggagacacaggctgtggttgatagggctgtacttgttctaacttggggtgggggtgctgcaggctgccagttctgtcctggtctgtctgctggctgagcgccccgctgtgcagtgcagactggaataactgtttttggtcaggactggagagagagaggagcaaagccctggcagagagggtgctctggcaggggagatgacatccacctggacaacaggctgcactctggctccctggacacgtgaatctggtggtgggggcggggtctttctatgtaatagtcccgaccacgaatgtctgggatgtgggagtcaaacctgaccccaaggagccagggacttactcagctgggtgctgagtgggtgctgagaagtgtccctgtggtctttcccacttgctttgtttttgaccatagtttgtgacatacccactctccccacagaaggaggccaagccatgtacccagtgcctggtgcacagcatgtgttcagatcaaagtgttgaatgggaactggagagacagctaccaggtcctaggtttggttctcagctcacaactgtctccaactcctgttcagagggatctgactccctcttctgccctctgtgggcagcaggcaggcacatgtgtgtatatagttacatacatgcaggcaaacactcatgcacataaaagtaaatatcttaatgtgttaaatgaagaccagtgagatggctcaggatctaaaggagcttgctgccaaggctgacgacctgagttcagtctctgggacttactcaataggagacgctggattttgcaagttgtttagtctctctgtctctctgtctctctgtctctgtctctctgtctctctgtctctctgtctctctgtctctctgtctctctctctctgtctctctctctctgtctctctctctctgtctctctctctctgtctctctctctctgtctctctctctctgtctctctctctctgtctctctctctctgtctctctctctctgtctctctctctctctctctcacacacacacacgttaaatttaaaaataaaactgaccctgctgtccaccgagggcttaagcactggggtcacaggctactgcactgctccctcctcctctgaaccagcgagaggactgttgtttccctactaaagcgtacagcgttgttttcatttttcacagaagtcattttgaaatagcttcgggaagatttgtagaatttcatcctcacacacaattattcctgaaaaaaaaaaatctagcataatggagggtcagggcagtgtgatgcaacaggccaaccaattagcagccaaatgaaattgtagccacttgataggacatggctggagcaaagggctggctgcctccaggaaccgttgcccagtgctgtgacacatgggctcattctgtgtggagtgcggtgcaagctgaggccacacagctggcagggcttcagtcactgcctgcttgcctgaggaagcccattcatcatagcaccggccaccagggcctgattacacaagggagtgaggacccagccagagagcaaatgccaaagggtctcccctggaaaaaaaatccaggaaaaataagcaatgtagaagcatgggtccaggccaagccaattaccaggtaattctgtattatcggggtagcagggtaggtggacagtgatgggtaagggagtctgtctacccctggggaagtggcctacgggtcttaaatgtaaacttgggcccacagtttgggctaggtagagcaaagctatcggtcggactcctgagcaagtcttaggcgagccgaaagtgtccagtgtccagtgtccaggctgatggggccaaggaactcttactgtctctctgagctgtgtggcagtggccatgtatgacaagtattataaaaagtcacatggggtatcatgatagtacacactgttagtcctagaactcgggaggcagagacacagggacctaggtgagttcaaggccagccagcctcttctacatggcaagctccaggccagccagagctacatactgagaccctgtctttaaaataaaataaaaaatctatatggtaggctggggtgattactcagtgggtaagtgtgctcattgtgcaagcataagggcccgagttcagatctccaccatctccataaaaaaagccagacttcaggctaacaatgatggctctacaataaggacacttgccaccaaacctgacaacctgagttcaactgctggagcccacatggtagatgagaactggctcctgcaaggtgttttctgatttccacatgcgtgtatgccccccccaccagtaaacaaatgtagaaatgccagctagacttggccccacttcctgtgacctcagggatgggcgagggaatgtctgtaggaataagactaagaggagtttctcctctgaccagcacccacacacacacacacacacacacacacacacacacacacacacacacacacgcagctgcaccttgccttcattaataactctgggaggcccagggatacacacgtcatgtgggtgtctgaacaattacatcagataggtagattcacaatcatttcataatcagacatcatccttctatttgtaaaatccttttatataaacaaaagtgaaatttaaatattattattctcagagagggaggatgactttgccatgctgcactaccagcttgtactagctataggctttgagctcaggcctctgtgatgtctgctattcgacacaactgtttctctccataatttaccattcccttctcttttggagtcagctttggggtccgcctgtatgtttgtgctgtgagctatgctcctcaataaattcaagcagttccctccctgtttctgaagaaggcagcctagaatgtagggtctgtcaaagctaattcatgttccaggttggtctggtcaactgctaaggctggtgtaactccacaagggcagctggaagagaggatacctcgtcccccactgtcctgatggcctgtgaacctggagtaaggcagacatggccattctggcacgtgtgagcttcctgaggtggtgactagctgctctcctaggtgcccactgatggatgaatgaacttcagtgccttgaaagaacttttcaactttacctctcagtaaagtgtgcaaagggattctgaatgctgggactaaaacagaagagatagctttagtctttaaaaggattaagatactctctgatttttaattgacgactcgattattaccaattaatttcatatccattctacatttaatccttacagttcaaacagccttatgagctatttttatcccagctgtctacttatttattgtatgtgtagctcgtgcacggtatgtgtatgtggtgtgtgaaggctctgggtggcctgctcactttctcaatgaacacggagctaggcaggcagccactgagccctaggctccactactgcctctgctcccaaccagtcgggggttaccggtgtgtgtggccacagcgaacttcttgtgtggttgcttttgatgtgaacagctgagccaactccgcagtccctgttattcaagtgttaaaaatggaggaagctagggacggcaaagatggctcaatggttaatagcatgcactggatcctattgcagaggacccaagttcagtttctagcacccatatcagccagcttactgtaacttcagctcggggtgttccaacaccctcttctggattcctctggtacttgtattcacgcacgcgtgcacacacacacacacacacacacacacacacacacacacacacacacacactcaaaaacaaaatcatctttttaactgagaaaactttagatgcagcacacagatggctcatctaatgtcacaggctgatacttggcaaagctgaaaaaagaccattttatctgctaagtccaagtcttcctagatgacaagtttcccatccttgcaacaccagctcctgggtttcctacctcaaagtgactgcctgggaagatggggaacacactgacaacagacagactgcactgtggtggggcagacatgtccaagtgagaactttcctccccttgtgaaagttcctgtctggtacatcaaagccaccttcctgtcagaaagagacatcccatacacatgccctggcatggatcaggctgctgaggccactcctggaatggccttcctcaggccacttctgaaaacagtggttcctcgtggttctctcacattaggtctggtgtcagggtgctcagccaccattaaggaggggttcctcctcttcagaccaccccaaaagggctcctcagactaaaaagagcaggcaccaagtaacttatgtccagcccctgatttaatcccttctacaagcctgtaatacaggataagtactattagacccataacccagatgaagaaactgaggcacagaggtatgaggccatttatcgaagctcactcaagctcctaaccactaccctgctctggagggaaaacggaaagctaaggaagggcagaattgggaaaactatcatatccactcttccgggcagtccttagatcagcatgactccagggtaaggagtagtagccccatgttgtggtgatacactaaagattacttcagaagcttcccaggggtatagctccatatctggggcccaggcttgtgcatccaagtccaaactccactgactctggcactccacagggcaggcttcagtagaaggttatcagaactaaacaagcaagtgttcgagaatgaagatggcgacaggcaggccaggcttggggcttgaaaacacatgaccttgggacagaagagtgtgtctttaacaagaattctccttggacagtgatgtacacctgaccacttaaagatgtgaacttgtcaaaataagatacaagaaccacccaaggcacagaaccatccacactccagctgagtcttggatgcacacgagtatgtgtgcatgtgttcatgcaccatacatacacatgtctgtgtacttgtcatacgtggaaggatgagctactttgttaagtggttttatcaggacattcatctcatgaatgatttttagttttctgaatcttctagttttcaaaaacaatgatcttgttttacagcccagaaaggaatcttatttgcttacaaagatacaaggcacagcttcttcctgacaccgtcatcagggataagactctcctcatccctctctggcattcctctcctgtctctgtctcacaggtgaattctccacgactttccatttgtgggcccctgaggttgtattcacccagaaacaactttggtgggagtggaagagaaggcacctaatggaatacacctttgaagccctcaagagggctctgcttaagacatgcctggagcacccacactgacggcctatcttcacagaccttctcccacctaaccagacttgagtgtcactctcaagtcctcggcagacttcagagctcattctggtttgtattgaggctctgcttgaaacatcgcttgggtagagaaagccacgagggtcaggtcggtgtttctatagtcttaaaagcttcttaccatcaagctgtgacttaaacgacatcacctacaaatctgagtataattttatatgatttaattctcatgtatttccctttgtgtctggaggaatcaaacatttcttaaaattctagacttggcaaaaaaagaaatcatattttaaaaagaaaaagaaagactagcaaagactgcaacaaagcagtttctatctgaaaagtagtccttggttggcttttttaaatgttcacaatattcttctgtggatttcaaaagtgcctcttccctttgccctcggtaatgtttgagcggtttctgagatcagggaatatctcgttttaccaagtccattttcaaagtaagttctgtactttttagggtgacatatattaagtaaccagacactggtctttggcttgaaacgtccgccagttctcataaacattccatcactagctcccttcatgatgatgaattctattgattggctcggatcagcttgtgacccagcagtggcattagacattggctataaagcattgcctcatgaatttttcattggctcgagtgtctggagagctgggcaataacctcccagagtgcttccccttcccctcctctctgggtctcagggctgatgacgccaccctgcagggccacattattggatcagaacgattacagcctggtttttctgagcagaatccaatttcctctgcctgtgtgatgggcttacaagtagtcatgtgatttttgttggggatggcatcacaggattactagcagatacagtaaacttaagtcatttcccgttaaatgtgctcttcgtgagactaaggcaatgtgtcacgctgcactggcctcctcctggtccagagactttccaggagatggagtgctcttggcaggtggagcattgttgaggcactcccaaacagcaactcacagttcccataacaccacagagaaggaacatcggtccatcttcggtgatggtggagagtaagtcatcttgaaatagccaagtgtcccctggacactcgctcgtactgtaggtctgtcaaggtcaggtgaagcagatgggaaagatgaacccacagagtcccatcctcatctggtgtcagcaggaaaccccaaggtccactttccttcaacaaaaatagggaaaagtccctcggagcttatctgtcctacgatggatcaccagattcagacaacatgaactaactcaagttctcctgcatagcagtggtaggcaaattgtgttgaaataaaattcaagcactaattgttttcaattttttaaaaattgtatttctcagctgggtggtggtggggcacgcctttaatcccagcacccgggaggcagaggcgggcagatctcagtgagttggagaccagcctggtctacaagagctagttccaggacagcctccaaagccacagaaaaaccctgtttcgaaaaacaccccccccaaaaaaaattcatcctggtttctattcctgctaaacacatggagacctcacgggagttgtggcccatgtgaagagggcaccctccatcttgtccacaacctgacacctgagcccaacagtgataatggagaaaccttctttatatccacagtgcttaccacacagcctgaccatgatacagactgaagaagagaaacaagcaggtctcatgagtcccatctgcagagatgactgagtgcctaagactaagttgattttgcttctggatattgggccttttcttataacttcctcctgaatttacaggctaaaatttccaaaggaacccagagaccttacaaaagttagccaccaagtcagagcacacacaagtgctgtgttgactgtatgagcccatccagcccctcattggattgcttctcgttcccagacggcagtgggcagcacaccctcacccagacataaggatgacaggatccttcgctgctcttggcaaaatgttgcaccatctccacagctaccaagcccacgggtctggaaaatttgtatctattatcaaacttctaatgagagatgtataaatactaccttaaactcaaggactagaaccctgagatgtcataggtgacaattccccttagccctctgctgtctgtagctgtgatccccaaacttggtgaacatctctttgcttcctgctatttatcctgaggaaataacaccctattgtagaacactgtaaagctgcccataaccatccccttggaaacctcatttcctctgtgtccttttcaaaagccaactctcggctacttgctctctttgccccctgcttgtggatcagataggagctctcagctactgctccagcaccgtgcctgcttgtgtgccaccatgatccccaccaagatgggcatgaactcactctctgaaaccgtgagccgccagttaaatgtgctcttttataagtttccttggtcatggtgtctcttcacagcaacagaacattaagacaaagacaaaacctgaaaagatctcagagaacacttacgtggtctaagcacaatattgaaagtgaaggaagggagggagggaggaagctaaaggaaggaaggaaagcctaggtgtttggagagacggctcactgagcaagagtacttgctgctctcccagaggatctagttcggttcctaggacctatgtggtgacttggaaccacctataatttcagttcgggggaactggcactctttctggacttgacagtgtctggactaataagcaaataccaccaccaccaccatcaccacacacacacacacacacacacacacacacacacacacacttctttgtctaaggtctaatgtcaagtgggacaaagaaagccagcgtttggctactttctttaaactacttggaacagaacttgagtcacatgcatctttgatctcatgcctggtctcatgaccatgatgacaccagacgacagagcatctgggaaggctgttcacatcctcctgatcacagggaaaaggtccttcatatgaataccatgggttgtgaaaatgtatttattttagaaatgtttttcctaaccactggtgtgctggtgacatcccaggtatttccacatcaagaagcagctacctctgtgggccgaagaaaggcctttcgggatgccctctaactctgctctctcataagctctccacatccaagacagtaatggggaaattccaagggccctcaggaaagcaggccccacgctctgtgctgtccttcagtgtgccccacagttgtgaaggttcccatttccctactctggctcactcaggccaacttcaaactcaacttggagagatcttcccccctatcccagccactagctgttccctgtgggagctgttccaggtgctgctaggaaaagtccttcacctcaatcctcccagactacagtgcccggcacagaacaggtcactgctgctgtgacccaggtgggtacttttggctctgtgctttgttaccctaaccctcccgcactgccaaaatgcccctcctgttccaggtcctggctaatgctctaggagatcactggcatccatttatttatttatttacatattgggcacacgtgtgaggtcagaggacaacttgcaggaatcagttctctccttccactaagtggtgggtccaaggactggtctctggtcctcagacttggctgcaagcatcagtcccatctctactagcatctgttgactagctaccgagtacagaatataccaggggaggttatatgacacacaggcctgacactggtatgtcgtgtggatactttacctagccatctacttaattgtgtctataaagaaatgtgcccacagccctcttttctgcctaactttcttgagcggataatctaactgcctttctcttacactttgtcctgtttaatttgatttcacctcctacctttctttcagacatatgctagctctatgcttatgttgactgccaggtataattttcccagtgggtgtcactggttcagctgttgactgcactcctcagaatcccaccttggctttcggtgatctgaacacagtttgctccccactctgacttgctccatgaccctctgttgtgtcgccttgtcctcagtgctgtgcttttcatcttctacctcctgggtgtctcaaatactcctacttcagttgacacctcccgtagtgtctatcagcgtcatcctttgtccctatatgcacacaattctacttgcacattctccctttacctggataattctcctagtctctcaaatacagttaagttaaatgtgtgactcacaactgtaatctcagcacttgggggtcagaatagggtttaaggccagcctagaccacacagtgacctaagaccttcaaagccaaatggaccaaaagaggggggggcatggggataaagacagggaaagagaaagtgaacaaggactggcaagatgactcagccaagagcctaacaacccaagtgtgatttctgggtcccacatagtagaaggagagaaccaactccagcaagttgtcctctaacaatggcacatgtatacacacatacagatgataaatgtaaattataaaaagaaacaaataatcttgtcccccaaatagctcctctcctaaccaatttattaacatttatatatttttacatgtgtttgtatgtatgtggtatgtgtgtatatatggtgaatgtgttggatgtatgtgtgattggaggccagaggtcagcataaggctgtcttccccaacatcttatttttagacaggttctgaggctcagtgattctctggactagctggccagcaagcccgggactcttgtgcctctcctactactgggatttcaggtgcatgctgctgttccagtttttatttgggtgttgggaatccaaacacaagtcctcatccttatgtagtaagtgtttcactgactagaccatctccccagccctcttactaatatttataaaagaaagcatgccattaacattgaaatataaatgtctaaacagaaccacctctcactcctctgtctctctgaatcccaccatctacaagtggacaaatacagagtcagtatgcattcactaaatgccttccttgtgccatacccagggaatgtggggttggagacaggaaggggaagagaggagagaagtgtattaggttcatttctgccaagctctgtgtaagttttggcacctggcaaaagcaactcgaaagagggagggagggagggagggagagagggagggagggagggagggagggagggagggagagaggagggagggaggggagagtgggtgggtgggtgggtgctgtgttttgaaggaggatgtccccatgggttcagatgtttgaacacttggtccccaggtggtggtgctgtttggggaggtttagaatatgtggccttgttagaggaagtgtgtcactgagggtgagctttgaggtttcaaatccctgcaccattcctagtttgctctctccacttgctatttgctgtcagagatgtaagctctccgctgttcctgccatgcctgtcacgggctgccctgatggactattgtccctctgaaacaactatttcttctgtaagctgctttggctgtggtgatttattacagcaacagaagagaggctaagacaaagggcttctttggctcacagtttgtgtgacagtcctgacagtggggaaggcgtggcagcaggagccaagggagcagagagagaagaaaggtggcattcagctcacgttcttccttttatttggggagcctagttcatggggtggtgctgcccaaatcttgggggttcttccctcctcagttaaatctgtctaggagtaccctcacagactcttcagagatgtgtctcccacatgattctggcttctgtcaaattgacagtatcaaccatcacaagtccacctcttgccaacttaaccaacgtatcactttgaaaccacagacatctatcccttgttcccataagctcatgggcatctcacagtgaaaattgtgttcagtctaacttcaaaagtcaccacagtctttaatagtcccaatgctgtccagtggtcagtccaaaggacttctgacaaccaagcactcttttacctgtcgacttccaggccatcaaaagacaagttacatggttccaacatgcagcagaagagagtaaaagacccagttctaaaggtaggagtgggaacacagtaagccaagactagaccaaaacctagcagggacacagcaaatcctacagctccattcagggagccggagactgtgacagaattatctggtccccgaagggagcctcacccatccagctctgccacctgcagcatatatggcttctccttaggtcagctacactctgcctacacattccctcagcatacacccccgcagctctgactgctccaataccctggcatccccaccgttaatgtaggttttaccttcacaacctcatgcagtagcctcttagggccccttccagggactctgaccctgccataccttgcctggcctgagcagttctctggaaccatggtgcaaaatttaagacccatcaaccttgtatctttgatgcttacaaaaccagtacagtgtgagcagtgctgctgagttctgctgtcagctttgggatggagcctggttccaggctgaccctggggcaaacacttgcacaggtaggtgcttttctagcagggaagccctccctgaggtttaggctcctcctttaaaatgcatatgcaaaagacagagcctttgatgggttggatcattttccttgtccctgtgaagagtgccagccttttctttaatggtgctaaccacttacagctgcttgtgaacttgccttatctgtaaccttaaactccctctttgtgtgagacctgtgtgtatctgtgtgtgtgtgtgtgtgtgtgtgtgtgtgtgtgtgtgtgtgtgtgtattgtgtgtgtgtgtgtgtgtgtgtatgagacctgtgtgtgtgtgtgtgtatgagacctgtgtgtgtgtgtgtgcccatgcacatgttcatgtgtgcctgcatgtctgtacacgcttgcccctgtagccagaggtcaacttcaagtgcttttctttatcactctcctcattttctgaggcaaggtctctctccctgagcccagggctccctccctgttacaagttcttcatgcattttttttttctagaagaaaagtgacaaaagtctttaagagcaggaatgatgtcttcttctttgtcctgttttctccatgttttaggatagaacaataaatgaaggaatacagatgttagcagaggccaggtgtggtggcacatcttcaatcccaccactcagtaggcagagggatctctgtgaatttaagtccagcctggactacatagtaagcttcaggagagtgggggggacagacagagacagagacagaatatatgagtgtgagaagtagtttcctggtggataatcatctgtagagataatttcttctctgctttaaaatagtgacatgacactcttgctggcctggaagtcactacacagcccaggctgatgagtgcagagattacagccacacactattgaaaggaaagtactggttcaggactccaacaccatataatctaatggtttttagcaaggcagagggtgtgggagagaagggcaaggcctgacagagccacacttaccacactcgagccggccagagtccctccaactatcatgcctggcttgtctcaggtcttagttttcttgtcttagtgcattggttcaaattccccagttagtattttaagtaagaggaaagtggggctttattttcagtggttcttttcccgttagtaattaccatgtaagctactttttgggtttatcctaaatcatatctcatcttccttgtatactattaaatttttatttatacccttatcaagttttgttctcaaggtgaactacaaaacttaggtgaagcaggtatttggcagctgtttggtgataggatcaattatagagtgccaagccagacgacttaaatcttaaatcatgagtcatttagcccatgtttattgttagcaaaatatttggtgaacatattagcccttgtgccatctagacataaattctctaggaaaaggtgaaaaatttgaaacaattcatgcacttgctgctgttacagctggctgcaagaacaacgggaaaaagttgctattttccctgacttttcactatacataataaacagtaaataaatggtgagtaagccactagtcagacatgctctaaagatgataaaatgaggagatagttagagaggaactgacggagatgaactatttcatccaaaatgattataaagtttttccaaggactatttgaacagagacttaagtgacaaaaaagaagccaactatacagagatggtaaggaaccactcaggctaagcaaagagcaaatgcaaagatactaaggtgagaatgacctccgccctttgtaaaaacgaagaatgccaagcagcactgaatggaaagagattaaggcctgaggctgcagtgattaagaagtaagtagaggaacaggtagtgtgctcgtaaaaataatgtttattgataagggtaatgtatttagtacattgaaatatgtttgtaagaatcacaatcaacattataaatccagggggaaatgtgcgtgaagaggtttagacagacatgagtgttgagtaaatttcctccaaaattgagacaatcatcctgtaaggtggcttctgaaacagaaggagcaaacaactcaacaatgcaggctgcaatcacaagagtctattgctaagagtcccacactccacagctgcagggtagagaagtcaaactagaattaacctgtaagctttctccctgttttcatcacaccagaagctggaaagaaaactcaacagtcttattcaggcaagaaccctgtgttcgctatactagtaacctgacagtcaaggtcttgcccaccaatgcaatagtagcatgaccattacaggggcaaccaactcttttctgattggatttcaagccttttacatgggatagaattcatgcttgacactgaaaacctggtcaaaagcctttgctggagagtgagtccacagaccctagtggggtagacactaccagtgtactactgtgtttttctaaatggatgcattggcaccatcaaactgtcttctaaatactcgtatttctgcatagattagtgttgctctcagctgtgtcagagaggcatcttttgcagtgggcagcagttactaccaagactcataaccagttaaagaacttatcccttaaggagagaacaaatataaccatctccaaagcacagagaacatcacataaaagaggttttaaaagaatgtagcaaccagaggaggggaacaatgtgatgagagctgtcttccagtcattaacccagagcagctacagttgctcataccagaactgggcctgacaaccctgcatcatggctaggaaaagggtttataggccccaacaccctctcaggcctgaggaactactggagtttatggttgctgagggagagggagacattttcttcagcaatgtggctaccgtaagttgctaagtttcctatgtacttgtaaatactacccatcatgctgtactagttggaaagaagaagtaggggagggaggcaagagaaaataatggggggatatcaaatgcattaacatttaaattgtcaaaaaataaaattgaagaagaaaattacaaacacaaaattagttcaacatcttaaagtagacataaagcctaaataagggaaacatgctgttttcatccatcccgtggaaaattctcgtttactagaacctgaggaaagattaacttgctttttagggagctaagctttcacaggatctttttggcagttcagtcagttcagacagatgttaccatcccacccctaatgacagtgggctttccaaagctaatgaatcacatcataccagttgcagtctttgtggtaagccagacaaagccacatgacttagctcccggctttgtactcttgtttgcagggaagaaccagcaacaaagcactttcagtctcactaaagttatccaaaaataacgtatgtagcaagtgagtttgggtgactcggaatggtcactctctctgagtcttgatttagactgtgaggctatttttggttttcagaacgagttggttgttgtggtctcagggaaggctcagcaaattggtcaaagcagtgctgtcatagcatagaaacttgtgagctttttctaagtgaaagggcactgagctccactgtggtcagaccctgctacaaaggcctctgaaggcctggctggcctgttatgctggagtttgtaactctcacagtgacggtggttttggaacaatcaccagcgaaggctttggcatttgcgtggctttcatagcaggctctctctcacaatggctaccagtactgtctctgctcaggtaaacaaagctcttggcccagacagtgggcctggaactaacaggttgcctgctttttctgtactctacacccacactgcaggagtcctggctgttctaatgaatcagtgcataggattcaattagtccattttccctcgtctctggcaataggaaaaattaatagtacacgcatgtgggactatctaaaggtatctttgtcacttctatggatgacttactctgatacttttgtgcttcccatcagggtttcagtgttaacatgtcctttcttttattaagaattagtcgggaagaggaaggaggaggtgggacggagacaagagaggacaatgagggcaaatattaccaaaatgcattatacacatgtataaaactgctgtcatcaatgaggatgtatgtgccagtatggctgcctgtatgtagtggtcacacaagggcatccgtgtcccactctgtcactccttgctttattcctttgagacaaggcctcttactgaagctggagctgggctggggtcagcacattctggcaatcctcctgtctctgtcccaaagtgttgatgttacagacatgggcaggaccatgcctagctttttgcatagtggctggaatccaaagtcaggttctcatgcttgcactgactaatctctccagcccagcgctttttctttcttacttcaaggccaatctctttaactttttgcaattttactgggctcagaaacttaaatctggactcccaccccccaatctggacgtttctagtttggattggccattctggtccctacttcattacccatgatgtaggttgaaggggtactagctcacgagagcgtgtggctctgggaggtcttgttctgccccattccctctgctttgctaaagaatattagatcacattcctacagctagcacccaagatctattcccttattggaacacttcttcctcctgaggctgactaccagaagtccagcaatcaatcaaaagctctctttggctcacctaattaacataccattaaaactgaacacttcatcctaacacggggtttccccttttacctgtgtaagccaccgtttgcccacgtgccatgtctgtctccctctatccaggggcagccctgtgtccctctgggacacacccccttctcccacgccccgtcctcccctctgcgcctatcttctttatcactgcatcctagtctgttcactctccctttcttcctcttaaaatgacacctgcacggtcatttgcttttgtttttctgcccaagtcagaaagcaaccactttaacttttcttcccccaataataaagtatctctctgtgaaaacaggtgtttgggtgtggtttgtgcttaatccagagtttggaagggagccaggagccctgtaggtccccactccatcgcctcccccgcccccatgcagagtctctttgctgagtaaatattcacatctggccaagcagcatcacatctctacaaaccccaagtgtagacagagaggcaagaataaacactaatgatcactactattaccaccaatagaaaacagggccaagtacaacacacaaaccaggtgtgacgtcaccatctgtaatccctgcacattcaacggggaggcatgcagatggaaaattcgagactaggctaggctacaaaatcagaccctatctcaaaaacaaaactggaggggggcagatagtctccaataagacatatttttgtaatacagattttccaaatatcaactcgtggataatttgttttataataggaacatttctaatactaaatgtttcacaaacacaagggtatttactttcaaaaaatactgataacacagcaaatgtagaatttcttttctttttttgttaagacacagtctcaattctgggctggctttcaactttctatggagctgaagatgaccttggatttcttatcttcctgcctctaactctcaagtgctaagatcacaggtgtgtactacaatgcctagcttatgtagtactgatgctgaggactgaagcctgaacttcattgctagacgagcattcaaccaactgagctccatccccaggtcttaatttctataattaagtcagggtttagtaatatgccatgatacagattataaataagaacacaagtgcatgcttttaaaatcccatcccttggaaggcagaagcagacagatctctctgagttcaagcccatcctggtctacagagtgagttccaggacagttgggctacacagagaaaccctgtcttagaaacaaacaaacgaacaaacaaaaagaatgtgaaacaactcagtttgttatccaaggtagcaacgaaaaagacgaggaacaacaggagggtagttacccgtgtcttggggagataggtaaatacctgtggatcccacactaagtccttttctatgcccccttcttttttaatgtagcccaagctggtctccaacttgctatggagttgagaatgaccttgaacttctgatcctcctgcttctggcttccaagtgttgggaatcacagttgtgtatcactgtgctattgtcacactgctttgtgaacagcgtcctttataataacctttcacagtagcaaaattacagggtgtaagtgagtgcccttgtgtgtggccagcaagccccgaaatctttgtctcaaggctgtagttacaggcacacactaccacacccggcaattacacggactctgggatctgaactcaggtcttcatgcttgcacagcaagtacattatctactgagccattgccacagcccaacaaaatcacctccaacttacaattcacaaagtggggttctgaaaggtaattccccatagtaataaatgctgagctgggaggcccctgggtcaaaggcagctcacctgtacccacggagcagtgcgactccctctcaatcttgagttcactgggctagtaaatgtgtatttctcccttctagttaggtaggcaatgttttcctatttgttcctctggttcactttataaagaatttttaatgtccactcttccatcatcttactctcatttccctgtttgggttttctgtggttattattctttggtcctactctgcttcattcctctgctcgcctttgacctatgtcccggttttggtatgttttcttgttttggttccttatgtagcccatgtttggcattaaaacattattttgtgtgtgagtgcacatgaaagttgaagggcaatttctaggagttgattctatctaacccttcacagtaggttctgagggttgaactggtcagtcatcatcttgcccagaaagcaccgtaactcactgagccattgcacctgtctctcccagccatgaaaaaaccaaaacctacaacaaaacaaaaccgcacctcatgtagcacagtctattctcaaactggatatgcagctggggatgacttgaaccctgatccttctgcctctacctccagctgtgggaattgcagttgtgagacactgtatctggaaaggaactttttgttccaatctgtcactaaaggctacatagcggtcccatattttcaaacatataaatatttgaaaagtgtttccctctagattagatctcaaaaataattttctgagctggtttataattccaatattctggaggctgaggcaagaggaacgccaaacggtataaataactcaatgtcccattatctgggacccactcacgatcttctggactcctccgaagggcttgagtcacttcttcagctctgccctctgcagcacacagctcgtcttctaggctcctgctggctccactccaccgctgctgctgatcttggtggtcttcctatggtattggcgtctccaaaatgctggggactctgctgcaactgggctgcactttcaccaatagcctctcatagtggcaccaagcctcaacttctctgcatgaccccttcagtcctaggacttcaaaaccactgagactgcagcttcaccaatggtctctccttagactctcacagtgcctcagctgctctccatgacccctttcaagccttcaaaattagcaccacctgggcgactctttattaccaagtccagcagtcatcctgagttaccgccttgatggcttctaaaacacagcttctctgtgctcgcaggaaacacttcccagaagatttcacttcagtgatactagtctttttttaatcgctgcttatttcttagctccagccaaccagcatcaagtttcttaacaaagcaaaattttgcccttactcgttctggtatcttgttaatcacagctgattcttcagccccagctaaccagagccacaggaccttaattcaaattaacaaatggccctgatagtctttaaacttaactgaaacttcacaagccaggcctcccatcttctgcactgctcttaacattcttatcttccaaattcccacagaacatcccacagagcttttaacacccaatggctcttctagcccaaggttccaaagtccttcctcaatcctccccaaaacacggtcatggctatcacagggataccccaatatgttggtaccaatttgtcttagagtttctcttgctgcaacaaaaacaccatgaccaaaaagcaagctggggagaaaagggtttatttatttggcttacacttcaatgaaggaagtcaggacaggaatccaagcagggcaggatcctagaggcaggaactgatgcagaggccatagaggagagagatgcttactggcttgcttctcatagcttgcccagtctgctttcttatagagcctaagactatcagcccaggaacggcaccacccaccgcaggctggggcctctcctattgaccactaaatgagaaaatgccttactgctggttctcattaggcctaaactccttcctctgatgactgtagcttgtgtcaagctggtacacaagactagcccgtacatatacgttatataagctgtggtggtctgaatgaaaacagtccccatagactcaagacattattggaggtgtgatattgttggaatagctgaggtgctgttggaggaagtctgctactgtagggtgggcttggagggttcaagctcacaggcctagtggctcactgtcttttcctgctccctggggggtccagatacagaactctcagctacctctccagcaccatgtcacagccatgcttccctccatgacaacaatggagtaaacctcttaactataagccagccccaattaaatgctttactttataagagttgccatggtcatggtgactcttcacagcaatagaaaccctaagatattaggcaacaaacttcaagtgtgtgctgtaccactaccttgacacatccaagcacacgtgcacaacatccaagttgagaaggtgcaagatgaagatttcacatgtgcagtaagacaacagaatctccttatctctggctatgtctgggtattccgatgtagtgacaatataggtgatacaagtatataactaatgaatactactcgactgacttcaaatgaagtcaccacactgctaaggtttttatgtaatttatgtcctagtggtaactataatctcaattaaaaatgaagttatatcttaagtagttttctcatactcaaaatttctaaatgaaaaaaaacagtatgtatacctgacataagtttattaaaatctgaagtattacattttaactaaaataacactgtttcagctgggcagtggcgcacacacctttagtcccagcactcaggaggcagagacatgtgcatctctgtgggttcccaatctaacactcaaggttcatcttgtcacacagactcagtgtcattctgagcactttttggtttttgcctacatacttacaatttaaaagttaatgtgacttctctaatattataatgtcccttcctttttcacatgcaactactgagaataccatgcacatacagacaccttggaacatgcaatgaagcacagagtagcaggaaaagtttgtccactgttagtacttccaggacagagtaactctttgtggaagagcccattgcactcacaggctatcttctaatctaagtgcttcttccactcaaaccctcttggttccccaaatacctagctttggtgttggtaacagcacaattcccgaaatttcccagcaagaggtgtggtaaagcattgtcctaacatcttggtcagccactggaacagtatccagggtgatgagaccaaggagcctcatgtttaatcttagagtacaagtactaagtgcaagttcagctttcttatgttccgcaacactctcaggggaaaagtgtttcatataccaaggtacacaagcatgtatcttaggttccaactctttgaaacaatttagactccccctcttgttcctgtaaaagccctgcagttgtttacattcaatgtctttttatatactttagtacttttctcacatatgaagaaaatgataattaaatcgtactaaaagtattcttaagttttcaaagcctcatgtcctcctgaagagaacatacaaactaggttaatattgccctgttttgttttgttgtttggtcagctttagtgaaaaacttctcatcccaaataacatgaagctgccactaatacctccttttagtttccaaagtttcctaggcatacacaagatttattttttaacattaatgggaacacaccacacatgtgcatgttttatgggtttttggatgtaatcatctgactgggcagtctacagcctggggagcaacatgtctaaattgtattgacctatgactgcccatctgtgagaaagacacactgcagtggttggaaacagagagcatgtgagagactactaccagaaagggatggaagagcaggcccagagcctgactgacaaaacaagactgcatttcaacaaggaaagacagctccagctccattctctgctcctccccctgcaggggccatgatccctcctcccccaagtctcccaggttctcttcaccctggcatgatccctgcactccacatgggaggccctcccacgatgccaaccatggccctcctcttgggatgatgcccaagacacatacctgggcctccgatgatgagacctcccacttgcattacgtcattgtccactcagcctgtcatgactcattcagacagatgaggctttctttatcagtatgtatttttcactctgtttcaccagagatcacaacgctaagattgtgtgttttcagatgcatgaccagaagacttcctccttcctagcagaaagaatagttttggagggaagaagtgggatataaaagtgcagttttcacttataatgtgaaatatgagaatagtctgctgttctaaaaattattattttgcaagagtgttggtacaatgctttagttccagcatttgggaggcagaggcaggtaaacctctgagttgaggttagcttggtccaggactatatagggagaccttatgtgatggtttgattgagaatggccttcataggctcatgtttgaatcctttaggttccattagtggaactgtttgggaagggttaggagatgtgtcactagaggctttgaagtttcaaaagcccacaccaggcccagtgtcagtctgcttatggcctcagatcagggggtgtaaagctctcagctactgctcctgtgtcaggcctgtctgcttcccaccatggtgatcatgaactaaccttcaaaaactataagccagccccgaattaaatgctttcttttgtaagagtagccttggtcataagacactctatctaaaaacaaaagagccaggaaaaaccaaacatggtgacctacagcttcaaactgagcagcaaggaagctcagacaaaacagctgttgagttggagaccaccttgagatacacaactactaacaggccaccaggaatatatagtaagactatcaaaaattttttaaaaaagataaagaaaattaagtgataaaattgaaaagaaaaacccggaagttagaagttctttatggaagataaagaaaaacctgaattatggtgaattttacattgtagctgttcaaaaaatccttggttagtgattgtagaacagccaggtagagagtgtgaaacacaaaagtatccattctaagcgtactgaaagggtgaagaaatagtagcggtagagccagcttgggggttacacagaacaagctctgtcctgaaagtgcaatttctgctcctaagtatgtgacgagggaagctgcccaagatgatcaacaacctagctacccttagtaacagatccagaaaacaagtttgtgtgatttagtgaaagcacaacacagcaaaagagggtagaaaaggcttaagtcttaaaaccacagaaacagaaaaaaaatggaattttacaagttctagaaacttctttacatgaggtagcaaaggaggtgtaggaactagccttggtctcagggctagtaatattaatactagaatgtaggctgactctttgatgcccaggtcctactactagcccctccttttgtgcggtattttgagtggtatgtctgcatgtgttcatctgtgtgcacaggtcccctgcccttattcacttaatgtctctcattaaatctagagcttacttttgcagttaggcaggctggctggccaatgagcagcccacatcttctccagtgtggactcagtgtggcatcttcattctggatgcactgtccactgacccttctgatctctccctgctctgccttggtccccttcccagttcctagtaacacttctattccaagtccttttctatttatatgcaaaagaaaacacaattgaaattatttccttaacatgtttctcttgtgatggtgatgacgcttctgtttgcatactgtattcactcatttactggctgccacctaggctcagtccacaccttggttatagcaaatgtcagtaagcatgcccatttcccttttgtatgctggttctattttctgattaaaaaaaacaaacaaacaaaaaacaaacaaacaaaaaaccccagaaatgtgatagctaactgatatggtcattccatccttcatgtttggagaaacctccatactctgttcgatgctggccattctcgtattaacttactcctaacagcctatgcatggtaagggctcctcttctccaaattctgcctttttctcaaaaaactttctgtaacatgggtaagtaatggagtctcattgtagttgcatttgtcagatgactaaatgagtacattcccataaagttattagctggttgtatttcttctttggtatctaatcagattgtcacatcctttgaactatatattaattgtgtaagttccttatataatcttctataaaataaataaagaccaattattacctgcttttctattactgtgatgaaacactgtgaccaaggcagcttacaaaagagtttaatccagtcttggttcaacagggttagaatacacgggggtagagcaaaggcatagcagcaaaacagttgagcgcttacattttgaaccactagcaagaagcagagagcatactgggaatggcaatgccttctgaaaccgcagaactgacctccagtgatacacctccaagaagagcatgcctcctaatctttctccaacacttccaactggggaccaaatattcaaacacaggagcctataagaggccattttcattcaaaccaccacagaccttttcattctatgggttggcaaagtgaagaccatctgctttgctgggcggaacttttagatgtaattccaggcatcatttcttgtttctctacttttgaagactcacctaggaaaactacctgtgccaataccttgaagtgttttccttacatcttattttggttccaatacaattttgcttagatttcattagctaactgaagtattttgtggtcacatgaattttgtgatgttttctccagttatgcaatgttattcttggtattaaaagtcaccagcgttacactggggcctaaatctccttttaaatctagtggtgttttttttataaaactaggtgctgttcaaatacctgtcacataaatttacatcttaatctgattttcttctagtagctttggatatagtttgtttatatctccctatatcttataaattcaatggtttactatattagtaatttttcttattcctcattgatatgtatctttttacagtggaatttattcacattctcaattatactgcttactaaattctttctcctctgggtataggattcctgtaagcatcttttgtaattgtgttctaatggtcatgatttcccttaatttatccttattctggaaggcctttacttctctttcaactgtgatggacaactttgctgggtataaccttggttggtagtaatgttcactcaggacctgaaacacatcattccatgccctcctggctttttacaagttttaagaaatctgcagttagcctgatgtatctaccatcaaatgttgcttgacctttctctcttgaaaactgtaatattctttatcctgtacttttaacaactattctacagtcatgtgtgtttgagcctctaaatgcttctaacacctacatgtccatgtctttccaaagatttggggggttttctgttattattttactgagctttttgttgttgttgatttgtttttacaccctcaacctgtagcttttcttcctcaggtatggcaatgatccaaatatttgattttttaggagtatcctaaagctcttggattttctcttcatgtttttttctcttttgttctgacaccaacaattcaaaagatgttttcaagctgtttatttttaattctgtttgatctaatttgttttacaggctgccaactagtttttctatttgatcttgagagctacttgtttcctctatgatttctgtcctgtttactttcagatcctgtgtcgctttctttagtacatttaactgtttggggcttttgcttttcattgttcctgtgttttctatgttgagaattaattgttcatttgttgggatgggtatcgtttatgatattgtatgctagtcttagtggttctctcttgataatatgttttggaagtattagtcttgggtttgacactggtacttctcaaatgaaatctagcctgttacttacagattcttcatctaaagcacaagtgacatcatttcacttccccacaaaaccacctgtgacttggagcggcttagaattcaacccagcagaacactaagttttctcagatttcgattctattacgtctttctttagatctaacccaccatgaacaataattcattaatccaaaagctatgcaccaacaatatagttggaaacaatacaaagggcctgatttcatggtgcttataacctagtgacagaagagactaaagaggaaagggaaaagttagagatggcttagtggctaagagcactagctgcccttccaggagacccagattcaattcccagcacccacaggaagctcatgacagtctaactccaggttccaggggatctaacaccttcttctggactccttgagtactaagcctgtttgtgaggcacagacatacatgcaggccaaacactcatacacataaaaataaatagatccttaaccctggtactggtcatggtggtgaagaccagcacttggatgatagaagcagggtgatcaagtttgacatgccagctggatggtgcaacaggtacctgccaagcctagcaacctgagtttgagatacctgaacccacctggtggaaggagagaacctactccaagttgtccttcagaaacaccatggtactcatgccccacccccagatgcacaaataatttttaaacagcaaatggccaatattgtgacaagaacccaactactaataatgcccaaatataaattaggttatggtcttggagagctgaacaaagttctattttttttgcatcttggtcctcacacagactatgccatatacacctgtttaaattttattttgaaacaaggcctcatagagttgcctaacctggccttgacttcctatcctcctgccttaacctcctgagtacctaggattgcaggcctgcaccacctgaactttacagcactctaacctgagtcaacctttgttaaacctggagcttttgctctctactggaacctgagtacaatataaaagtttggcagacaaaaaacaaacaaaaccacaacaaacatttaagagaatgccatgtgaaggttcttataaacacacacacacacacacacgtacacgtcccccctccccaatcagcccaagtttgagaacatgactcatcatcactcggatcttatcaacttcacactttcagaataggggcaggcatggtggtgggcactgggtcatttgcttttaaggccttttctctattatgtagccctggctgtcctggaactccctctgtagaccaggctgtccctgaactcagagatccacctgcctctgcccactttatgctgggattaaaggtgtgaaccactacactaggtcacatgtatttaaccccagaatttgtgaggtacatgcagtcagatctgagttgtgaggccagcctggtctactccctgagttccaggacagccagggttgtgtaacaaaaagaacctgtctcacaaaaacaaacaacaacaaaaaatagaaactttatagaggagatgaaaagcatggcccaagaaagccaagaaagtcaggcctaaaatcagagatggaagtagaaatgtaaggaatacgggtaaagggagataaaaagatggtacagcagataaaggggtttttgttttaataactttttattttatgtgcattgctgttttgccggcaaataaatctgtgtgagaggattggatttcctggaactggagttacagaaagttttttgggtgctgggaattgaaccagggtcctctggaagagcagtcagtgctctcaactgctgagccatctctccagcccccaggtaaagtctcttaacaccaatttggcctcttgatttccacaagtacccccacaacagaagttttaaaggagggatgcccctgtttgtgtgtggaggcagagagaaaactggaccaggtggcacagccctataatcctggggaaggctaagccaggaagatcacatttcaaggccagcctatacaatttagatatctcaacaataaaactgaaataaaataataaaaaggcaattcaagatgcaattgggttgtagaggcccttggtttaactgtcaatagcacacacactcttttgtgctaaagatcagtggtcatcaaccgatgggtcacaacccctttgggggtgttgaacaaccctttcacgatatcctgtatatcaaatatttacattacaacacacaatagtaacagaactacagttacgaattagcaacgaaaataattttacagttgggggtcattacaacctgaggggctgtattaaagggttgacgcattaggaggttgagagctggtcatgagacaactcttggtatgcaggtatgtcaaaaataccaatgagtttgaatcttcaggccttgtgaactggctaaaggtggagagttacagggaataaagttctcaaatgcttgcacaactgagcatttcccaattcacaggggttcttgtgagttggaaacctgcttatttttggaaagcaaattaaaaaaaaaaaaaaatcacaccagatgctcttgtcaaaatctccatggctaaccttcctttttcaaggtggggagggaagatagaaagacaaaacctgaaacacccattagaaaatgtcctcatgttaccatttaccaccccattttatcattaaacattgacgtttccagtaccacgagggccaaaggccttctacagctcacggagacgatccatgtgtaacccgagcatccctcactaagaacgcaggtcacaaaagcgcggctcactttccacctacagggcttttttctaaaacttctctccaatggggctgagagtccattttgcagggtgcctggcattcatttcttcaacgctgaatggcactcccgtaccccagtcttggacccacactacggcaactgtcgaactccacacccgcccctccagtcatcctcacacctgagcctggggaggtgggtcggggtcagtccgtgcctggtcttcagagtggtgctggtggacagtgtgggtgacagaggccgtgtgtggcctcctgttctcctcacagacttgcagggaagcgtcccgagtcctgcagggaagatgctgcgacgacgggaggccctcgacaggatgacaggcggacacggtctcctcagctgtgcgctggtccagcctcgaactcaccgaactcaccaaggtcccaactctacctcaactcgaattccgctaagtttcacccaccagggaactttctagaacttgcttccctcggaaaaggcgtggtccacagacccagttggggcagcttcctgactgcccgactgtgggcctgcagtgcgggctgtgtgtgtgtcgagctcacgtgagtctcaggtgctcagggtcctcgtgctggaccccaaggattcacctcacgtgaccctactcctcagcaacccccccacctcacctcatgtgacttgtcccctcaggaccccccacccgtctcacctcacgtgacctgacccctcgggatccccccccacccgtctcacctcacgtgacctgacacctcgggatccccccccacccgtctcacctcacgtgacctgacccctcgggacccccacccgtctcacctcacgtgacctgacccctcgggaccccccacccgtctcacctcacgtgacctgacccctcgggacccccacccgtctcacctcacgtgacctgacccctcgggatcccccccacccgtctcacctcacgtgacctgacccctcgggatcccccccacccgtctcacctcacgtgacctgacccctcgggatcccccaacccaagcccgtggcgaccccgcggccggctcacctcacgcgaccccgacacctcacggctaaaattagacagggcgagcggcgcgctcccgtgcacgcggcctgcgggccgacggcgtgcgtcaccagccccgcccctcgcgaaggacgcgctgacgtcgcgggcgtgtcccgagggtgacgtaagcgcgcttccgagagggcgcgctggaaagttgggcgcgcctgtcttaaaggggccgcggcgggtccagcccgagctgtaagcggggtcccagactccgtccccgcctcagggctcggcttgcggcggccccgggccgcacggctgcagctcgccgtcccccaccccgccgagtgtcccctgagcacagcggccagggcgagcacagcctcccgacgctgtccctcaggctgacacacccagcatccagcaccgctcgctcgctcgctcgcctgtgtccgctgcgcgccaggcgcacgggaacccctcgcgtggacttggaccagcgttccggccctcagtctcggcctgtgtgcccgcccgggtctgcggccacaccctttgtgcccccagacacggaggagcccggtgcccgggagctagggtgacatccggggaggtcacagcctgaggtctgcggcctgtgagagggggagggtcctcaggagttaacacggatctcacacacacacacacacacacacattcacacacacattattcaccctcttacacacacacacactctcttacactcacacacacattcacacacaccctcttacacacacacacacactctcttacactcccactcacacacattcacacacaccctcttacacacacacacactctctcactcacacacattcacacacacacacatactctctcttacactcactctcacacacacacacatacatactctctcttacactcacacacacattcacacacaccctcttacacacacacatactctcccactcacacacattcacacacaccctcttacacacacacacactctcccactcacacacattcacacacacacacatactctctcttacacgcactctcacacacacacacgacacacacacatacatactctctcttacactcacacacacattcacacacacacacatactctcccactcacacacattcacaacaccctcttacacatacacacatactctcccactcacacacatttacacacaccctcttactcacacacgcacacatactctcactctcacacacattcacacacaccctcttacacactcacacagacactcacacattcacactctcacacacacacacacatactctcccactcacacacactcacacacaccctcttacacactcacacggacacacattcacactctcacactcacactctcacacacgcactttcacactcacattctcacaaccacagagacacctgcacatccatgtttttgctgcactactcacaacagccagatggggaacaaccccgatgtggatcagcagatggctaaggaacacgtgttgtgcatacacagtagaataaatgttgtagcttacgtttttattcatttgtttattcacgtgtagggagggtatgggagccggcgtcctcaggcttggtgacaagccccttaactgctgagccgtttttcgggcccctgcaataatttttggcagagaatgaaaattgttgtaggaaaatgggcggaactggaactggttgttaagtgatgtaagcacacttgaaaaagcattgcatgttttctgttatatgtgcagcaggggctggggacatgcttgagcacttaagactgttctgcagaggacctgagttcaattcccagctcatctggctcctcacagactccgctgtctccaggtccaggggatcctacacccctggcctctgcggacactgcgctcatgtgcacatgctcacacagagacacaaaccagccacacgattcaaagtaaatctttagaaccaaagggagggacgtggcatggcggggagtaaaaggagcttgagaagagagaaaccgcgaaatgggggtaagcaagcagaaggaggaggaggagcagtaagaggggtgaggggcgcctaaggggacgggtaagaggaaagaacgaactataatgacctacgcatgaaaatgtcataatgaaacccagttctttgtgagccaaccaagaaaataatttaaaataaaaaataaaaagacccaggtagagcaatgggcacaaacgtgcccacaaacagtagtaggccggacatggggcgtgaacatggacttgaaatcaatcctaggaggaaccggcggccctcaggactgccggctctcctcctccccttctctcccacccagcttccagacaggcgacccaggcctggggtgattgtccccatggaatgacactatgaggtccactgctgtttttaaatctgcagtaagcaagatcctgtgtgtcatcgtagcttctgatttcctgagatcccagctctcactccccaccccagaagccccattaaatgtcactaagagccataaatgcaagccaccgctaatgcggaaggattgtgatctccggcaagcagcagcagcgagcaaagagcaggaacccttggaccgttcccaaccatgtcagtgactcactcggtgacacaaagcaccaagcacacgggagagagaccaggagcggtaggcacacgctctgctctcacgggagtgggaagtgatccaggagttaggagtcaccagccagcgctccctgggtcccagcgtggtgaaacgcaaaggttcatggctgagcctgactccatggtaattccctagcaatggtgtgctggtgagccacgagctttgtctactcaagtattcctggttcaaacacagcgcctaagatggttgtgtaggatcagggcacttgtccttctagacttccacctcatgggtcagaaatgcaccctgcttatccctgcctcccctctgtaacttgtacaactgcacccccccagggatttttttctgaaactcttttatttctatggcagcctgtccagtccattaaataacttaagctttcccgtttctgtagaagtttaggtcttaaaatggaggaagaggggtttgctataataataacagcaacttcatgcttataaacgttacacataaaataataattgtaattggatcttgtttttttaattgcatctatttgtggttgtcatgtttgcagaggtcagaggacaacctgtaaaagtcaattctgtccttccacggtatcatggagaggctctgagagccttctcatttccagtcaataccttattctccgcccacatctatcctcacctccaaaccagtattaccaggggtggagctgtgagggcataaccgcacgaaaatgtgtgtgaacagcctctgagtcctcccggtcctcaccatgtggtgggtgcttgtcttacctaggtctgtttttattgtcaacttgacccaacccacagccacatggaatgagtgacctcacatgaagagtcgccctatcagattgtctgttgccgtatctgtaaggaattgttttgcccatgattggtgtaggagtgcccagaccgcagtgggcaacaccatgcgtgtaagaaaatcagcacaagtaagccaaagagccggacagagagccatcttccccctggtctctgcttcaaccacctgccgtggcctccctcagtgagggacccagaaaactgaaataaaccccgtttcctccccaggtagctgacggtcatggtgtttatcacagcaacagcaaacaaatcaggacaccctgctctcacacactccggggagcaagtgacaccagcagcaggtctttagttctcacagtcctagagtctgggagtccatgtccaaggtgcaggaggtgagggccagctccctggtgcatggctgccttcctgctgcctcttcactaggccttttcatggccgtgtgtccatggaggtttggctgtctgtgctgtcctctttctataagacactaacccatcagcagggtctccttctgctcttgccctaacctaagcttcatcacctcccaaaagtttgatatggtggctcttatctgtacttccaggactgaggaggctgaggcaggaggatggcaggagactctgggtcagcctggtctacatagtgagtttcaggtcagcttggcctaggcagtgagacccagtcgatacgcacatacccacacccccaacagcatcacactggggccaagacgttagccttcagtgctgcttattagggtgtggagatctaagacagtctcacgatatagttcaggctggcctggatctcgacatcttcctgcctcagcctcccccgtgctgggatggtgaccattgagctatgacagtgctcagggaatactgagtgatgggcagacagcagacgggaaaacagggacccatgtggtactggggtccaaatcacagggacttcctaagaagagctcagtggggctcatttgctttgctttatttgattgtatcaaggtctctgtagcatagagcagcctccatatgtatcccaggctggcctccagctcatgaaaatcctctggcctcaacttcctgagtgctgggattacaggtatgggtcatcgtgctcagttcagaatcccatcatcctgtaggtaaatgaacagacatgaaacatctagacaataaaagtattcagtgctgagagagagagagagagagagagagagagagagagagagagagaggccgtcgggggggcggtggtggcgcatgcctttaatccatccagcactggaggcagaggtagtcagatctcagtgacttcaagatcagcctggtctacaagagcgagttccaggacagtctccaaagccacagagaaaccctgtcttgaaacccccccccaaaaaaaagagacaagccacctagccctggaaagacacggtaggagctcaaatgtctacactgtgagtggagcctatcttagaagacttttcactgtgcagttccagttgcaactgtgtgacattcccgaaagaggcatagacagtgaaaacatcaggggctaccagggattgaggtggggaagtggtcaaagcacaggggctttccttttgtttttgagagagagggtttcatgtagcccaggttggcctcaagctccacatatgcagctatgtagtcaagaatggccttgaacttctgatcctgctgtctccacttcctgagcactgggatgataggtgggtgtccagggcactgtgaagtgactcttagtggcactgtcatgggggattcctaagccagacatggtggtacaccctgtgatcccagcgctcagaaggttgaggcaagaggattgagttctagactaacctagactacatagtgggttcaagtaaacatgagctacatattctggacaagcctagactacatagtgagttcaagtaagcatgggctacatagcgaggcaactctgtctcaaaaaagcatatacacaccaaagttgttttaacacaaactcacagaatgtgtgccaccaaggtaaataaggactgtgggtgacaatgacgtgtcaggtagggctatcaattgacctttccagtggggaatacagacaaaaagagtagttgtgcccggtatggggacaggggatatttaagaaatttccatactctctgatttatttctatagaaaaataaaaactcaaaactgctctacaaatgaactctgttaaaaaccaaccaaacaaacaaacaaagccaagtgacgtggcagtgcttctctgtaaagctcggtgctctgtggagtctcacagacagacctgggctgaaatatgagctccagccggctctggtcagctctgtaaccttgggaagtcactgaaccctttggcctcagtttctccaactctgctggggttgtcctggcttcctcagtaagtgcagaacgtcataaagagtctgtcgtggcacccgggatctgtatacagtcctctccctggcttggaccatcatatcctctgtcctgccgacttcacactcagcccaggggaagatgctgtctggagtgaagacatctctgggaaggaaatctgcatggggggggggggcttgtcttctgatgctcagaggggctgccccaccccactgccccagaagccagatgttcactagagccccagagtcagtgtctagcccctcactcagcttcttccacggaaaggtcaggatgacagaggtcaccatatttagatgatggctcgcaaggaagcctcggtgggttagtcacctataatatgacctcatattgccactcaatagagtaacagctgttagttgctttggggggcaggggaggggtcaactccagacaaccaatcgtgcctggaggataaattgggtaggaccagagcagacaagagtagggaagagagagtcctctaaacagcatctcccacagagtcccaaggatttccagtacctcaacccaaaatgtaagtcttgatttttctttgtttggggaaccagtgggagaaaaagcatactcaggaatcttctagccggggcatgccctccatggccaggctgggtgggtgccaccctgaagagggtgggaaatctgaaattctgtgagccaatcacatggcatctacatggcacccaaagtggtggtctgcaaggtaggggctggaagcgactcaggatgagggtgctgaagaactcccaggcgcacaggttccataacccgggcagggccagggagtggtggttcagcctcatcctaggcaaagctctgatgccacctggggtggctctaattcacctcaccctaggaggccattgggcttggttcagcccttcactccagtgtcctccccatgacagtccttgttttgtgcccgccccatgctttagggggggaatacttcatgtcagcagttgtgtggtcttggggactctcttcatggttacactgcaccaaggccagagtgagcaagtgaggggcttcagtgttcgggaactggagggagggcagaggacgtgtttggaagcctgttgctgacacggttgtgtcactttgggcaggtcattgtgctcctcttgattctgtctctacctcaactgtagtaaggtgtgcgcttggttggggctccttcctacccagtttggtcctctcctgttctttcaatgtgaaagacatgtgtcttggctagagtagaaggagcataggactggaggggtttgttgcttgctgtgcaaccttggtcagtggcatgccttctctgaaccctttttccctatttataaactatggttgtaaggagacctctgtgagagaagaatgtatttgagggtcttttctgaggcaatgtgaaaggtgttaagtggtgccctgggtttggctggaatgttaggtaaagctggctgaggcgcagataactggggttacctgagagttggctggccaggggggaggatcacagtcagttagcctgtgggagcttccttctgatgcagactttccgggttcctgatattccacagaagctaaaagagtgaagaagtcaggaacgacatgatacccagaaaactccgggcaagtggctgctgctgtgctggatacccaaatgggcacgtggctaaagcagagaggccgggaagccagccagggtgtgcagggtgtgcagtcccctcagtaaggagtggcctctcgggtcctagggaccaacttctgaggagccctcggcagatgtgagaacactggggggagccctggaaataacacctgatcagtgactagtccccacccaccctgggacagtcacagagtctctgtagaaactccacactcctgttttccttcatttgagtagatgcccctcacccccaaccttcagccctacccctacccctacccccttccccggttagctatgtccctgcaactgtcccttccttgtggcagccacagcgattggcagctccttttgaagctgttcttggaactcccggggtgacttcacttccctcccagggcagggcagggtggaggagggctctcttttcttctggttctcgatgttttgaagccccaggtgctgaggctcttaaggctagaggagatggccagggcagagcagggctgcccagtagctgactcatctgacattaccataattacagcgattttcaaactgtgagtaatgcctggtgtcagagaatgtcagggaacgtttctgagcactcccagccgctgctcgaggctgaaccaagccaagggcagggaagtgccctgggacaccacctgcctcagccagcaggtaacccaggggctccaaggattgagcttctctgggaccatcgcctctggtgtttaaacggaggtgggaaaatgtctttacaatataatttttcatttattcagatctaggaaaagctgtgtttaaagtctgtgacaattgtctggggatagagacccacaactgtaatcaacacttgagaggctgaggcaggagaattactgtgagttctgggccaacctgggctacacaatgagatcctgtctcaaaaaaaaaagttaaaaaagtctttggggacatatatatatatatatatatatatatatatatatatatatatgctgttacttatttatctgattttgctatactaggttttgaacacaggcctcgaaaatgctaggtaaaatactctgcccctgagctatatcctccagtctgaaaatgaaactgtttttggacatggtctcaggtagcccaggctaacctcaaactcaaggtatagactaggataaccttggactcttgatcctcctatgtctagctccccaacactggaatcagtttatgtggtggtggagatcccacccaggctttacaggtcccagggtggcactctgctaactaagctacattctcagctccttttaaaaactttttacagccaggcattggtggcgcacgcctttaatcccagcacttgggaggcagagggaggtggatctcagtgagttcgaggccagcctggtttacagagtgagttccaggacagacaggactgttacacagagaaaccctgatcttaagctcattctgtagctcagtgttactataggcagaccttgaacttgccatccatcttcctgcctcaagttctgagtagatgaattacaagcctgtgccatgccacaaggcctggttcattctctctccacccttcccttccctccccctaatttagggtttctccttttttttttacttacttttatacatgtgtacatttgtgcaactgtgagtactggtgtctaaggaagccaggagaggggttcagatcccttggagttgaagttacaggtgtttgtaaactggcatgtggatgctgggaactgagctttggtcttctgaagagcagtatatgctcttaactgttgagccatctctcctggcctcgaataaagataggcagatgattaatattaataataatgataataccaacaattacaattataaccagacatggtggcacacctttaatcccagcattcgggagacagaggcaggcgaatctttgagttccagcccagcttggtatatagggcaatttccaggacagccagggatacacagtgaaaccgggtctggaaaaaataagcaagcaaacaaacaattataatagttgtcttaggatgtcactgaagcatgctgctgctaagatgtgactgtgatgattgttcagggacctgtgacgaagggttgacagctgttcaattaaattttacacacgtgtaatcctggcattcctaggcggaggcaggagatagaaggatcttaagtctgaggccaacctgagagtctcaaaaaacaaaagacaaaataaaaactgcagttcacagtcagatacacatttaaagatacaaagaaagttatattaattctgtcaaaagaagtcgcaaacaattaattgtataattttaattggaaaataaacagtttatatgccaggatggacttacaagtttcaatatcttgtaatcgcagctgtagctttttacaaaatctttctctctgtgacaggctactctatccaatctcccttttatttttaaattttattatactgtttggggacaagatcttgatgtgtaactcaggctagcctcaaacttgccattctgagtgctgtttcatggtgtgagccaccacaccaaaatagctttcagtctgaaaaaatagttacggagtaatggtcttctacgaagttagtcttaaggagtcctaagtgggtttagtatctctgcactgtgactcacttaacacatcccctgtgtgaaacactcaggggctgcctggttctccaatattcagagaacactagaggggacacttgaaataaccaaaactctgtgcagagacttttcccacacacaattggttcctgttgggttttttggtttggtttggtttggtttcttttcttttcttttttatgcttttacaagaaagcaagtgtatttcttaaatataaaccagagtacacaaaacagagtgtttgtggctcataatataattttaattttggtaaacacacaggaataccccatttgttaacaagttttattttctgtgtacatattttacatttagtctttatatgtttgtgtctgtctggacatttgtagcaatttagaattgttacacatacagaaatatatatacaaatacttgcatgtctagtttaatatttttaacatataataataatttcctggtttaatggttacattttaatattggttatattcatatattttggctgatagatttttttttgtgtgtggtttttcaagacagggtttctctgtattgccttggaggctgtcctggaatttaagctgtagaccaggctggccttgaactcacagagatccaccggcctctgcctcccgagtgctaggactaaaggcatgcaccaccaaagcctggttgggctgatagatttaaatatactatatgtgtatcatgtaaatatttatacataatataatactataaaagtgcattaaagcatacttaacatatttttatacttgtgggttttgttgttatttcaattttagtttttgggacagaatcctatgtagttaagaccagccttaattttgatatatatcaaattgttaaaagtgcctccatctccaaagtggtaaaattataggcttgttttgatttttaagacaggatcttgttgtatagcccagagtggcctcaaactcaaggcaatcctcctgcctcggccttccaactgctggaattgcagggtccattcaccatacaaactcataagattttaataactaaaactttggttgggatgtaaaataaataatttaattaattaaaaaataacattcaaatgctggttttgcctgtctgtcacatttttatgaaaggcatcctaagtcatttcatagacatctctgatgtcatttctgctgacttttgctatggcaatttgatcttttttaaaatcatattttctaaaaaataattaataatgaaaaccacatttttcagtgctcatatagaaaagcatagagcagagcatgttggtgcataccttccaggacagccgatgctacgtggagaaaccctacccaacacacacacacacacacacacacacacacacacacacacacacgacagagagaaaggaagaaagaagaaagacagttattttctatataagatagctactagatttttaacataaaagtaaagtttttaaaaatttcctttaaaaactatttgatattttaatcacacacatatttagattagcattttctagaacactcacatgtcaactgtaatgattttagttggattattccttttagtctccagaaatataaagataacatttactttctttcttttttttttttttttttttttttagaaatgctccatttcattggttagaaaataccaaaattaaaattggccataaacaacagcatacatttcatttctgattttaatgctgccagggtagctcattttaaaggggtggctttgactgcttccggtgtgcaatcattttcaaataaatacaaacgatggaattctctgtgtctttggagaataccactgatcttggtagttttcttgtggtactgggcactgaacccagactgtcttcttttccaaacctctttcccaggacccttagcctctgtgtacgacacagactccaatgttcagagttaaaatccagctgatttttatttagttcagattggatgaatcttctgggcactcttatctgtttcaatttcttcccttatatttataatctggcaacattttcttttcaaggtttgatataggattgcctctttaacacaaataagataagctgtggtattttccaatgttttgaaataattatacatgagatgtagtgacttgattttttttttaagagttgaaagatttttcctcctgtgatgtgtaggtctgcatgcttctccagggagaccccctccctctttcctatttcagtcccttcagctgtaacttgtatttagttttatatttctagttatgtacttctaggttattaatttcctttaggttttcaagtttaacatagttttacaaagtattatcttagatttaagataccaatttttctggtgatgaatttattcttctttttactagtaattttattaactacagtctttttttcttacttagttttgtcttgttgtctattttaaaatatagcccttgaactaattctatgaatttccctggtttcagcttggtttctcttgtctcttttctctcttcctattctttaaagattttgttgtttctgtgagtgttagggttgaatactttcatttttgttttccttgaagattattaaaatatgaactatacattcaccttttagtatagatctgataatgtttcatgactttgacatggtggaccttctgggatcatcttctagctgctgaatttttatactttcatttttttttaatattcttatatttcattttcacattgacttctacagccagttgtgttgcttgggatggaagagttaagcttatgtaatttctgcttcttaaaatagctccttccctcctcttgtttatgtttatgttttgtttggtttggttactcatatgccttgcacattttttcctccttgccctgcccggctcctacgtggtctgtcctacccttttccacatctttcatcttaaagcagccgaatggatcctcttaccccactgtttcaatgtttatgtgtcatataagaaatctttccctatctgatgccaatgggtgtattttcttataaagttcctaggttcacacttgggtctcagtggttgatatgagcagggagtcactccgccggcttcctcccacacagacacacagcggtctcagacctgccactgccgcagtcacaggctgacttccttggtgcacatggtatttcagagcttttattctgatccagtcatctatttgtgacctcccatgccagtaccactgacccctttaataagtctaaatatttaataagaccaatcctgcgcctctcttgagtcccatcagaataatcttcccctctgggccctcacatgtgaatcacacacttgaggctttcaaaactaaactttttttagttttgaggcactgagtcatttatagataaccgattgcttcgtgttattgggtccctaattaacaaacacagtatttctacttattaggttttttgttgttgttgttcagtggttttcttcagaggctttgcatatattttaacaatctgttcctaagcagcatacaatataactattcaaaaataaattatataaaactttaaaatataatttatgggtgtaaatattcttcttttatatttcctaactattggccttggtgtggtttgtgttcccttgctgcacattttgagttttctgttagagcccttcattttttagaatagttttctttctctttctcccaactctacttacactgcatcaataaagacctttagtgtaaacagtggttacaaccagtctctgtagattattcctgactttaacagaaatgtctctaagatatccccagtttgtatatttgcctgcacagtcttaatcgtggccttttatcagctgaaggaaaatgcctctagacctagtctgctaagggttttgtttttctaatatgaatgaataccgagtcccgtcaaacaccctctctctctctctctccccccctctctctctctctctctctgtgtgtgtgtgtgtgtgtgttttcgaggtgttgcttaaaaggtaaaggataaataacttttctttttaatatgttaattgaaacaggtttttaactttgaattacggtttcattcttgaggttaaattctacttcaccatattttctctaagacttttggttgcttgaaaactaaggttaagctgtgtgttctttacaaaccctgcttgattgactttcatgtctcaaaaattaagttgggagaagtcaccttctttttctttttttagtccttttcttttctaccctgttctctggaacagctctcatcttgaagcagggtttatgtggaatatctgggaaagccttctggcttcactgcccttgcagctgggagaacattcaattttcactggaaattttttcctaatttcatctgaataaattatcagatttttttttctgaaaagctacccacctataggtttctgtacttcttaggataaaaggaataattaacgagtttctctcgggcagctactctcagagtttatttctataaggagtggagtcttagaagcaaagatcctccgtgccctggtgatcttcacacccctgcttccctctgcctcctgtctctggtatttattcttttcttctccatcaggtttctctctggttctctgcctcatttcttaagatgaacacctcgcatatgtatccagtgcttgcttagtttttttgtttggtttttactgaccatgcgtatttggttaagtagaatttcccctctctttggccagaataaggactccagcactgggctgcgttagaaccctgctctgtatcttatggttgtttcagagttgtagccttgcctctaaattgaaaagaaaaaagggattttaaaggggattttaaaatggtcagtacttaatgttgtttatgaaaacacagcatccttttctagctttcagagtggcagtctgtggttggtaagctcttactggatgaggatctgtagcgtcccaggactctagaaacacactctagaatctactgcggtgtaagtgaaagctacaatctgactgatttgcattcctttgtaggtaatccttccttatctatcaaccatttatcctctctttacccttaaggttctgcagtcttcctacagtatgtctctgtatgcaccatttcatatttctttgcactcaaatgtaaatttgaccttttttattctggaaattctctctctctctctctctctctctctctctctctctctctctctctctctctgtgtgtgtgtgtgtgtgtgtgtgtgtgtctgtctgtctgtcttcactgaatcagcaccatctctttaaatattgctttgccatcattttcctcttttccagaattcctacttgatggtggctggtacccacccgtagattttctgtgtcttttattgtgcttattttttcctgtggccctctgcatttaactagggttgcttgcatgagcacaggtgtgtggatttacagactgagggcggctccctctgtcttttcaggctttctctccttgcctgtgttctgacgtgccattcaccaccctccccagtccaccaacgccctcttcaacttcacccaggccaagagttctctcattcgacctatgagcaagctaaacccccagctaatagactgttggcctcaacgttctcaatattcctgttattcattaggaggcagcctgtcagcccctttttgaaccatctggattctgtttctgtcctgttttgtttgttttgtagctcaggatggcctctagttcactttgtaacctgggatgatgctcttgcttctacctgacaatcaggggcattacagatgtcacatagtttactcagggcctagagcatgctgggaagcctgctactgtctaagccctacctgctgttatttgcatctttcttgcttatgtctcctctcatccatctcttgacaccctgaatgtacttattctaaattcttcgttatgctgatctacgaaatcagtttcagcctggagtacagctctgatctgattactgactttgtggcccttctttctgagtgtactttggaatttgagttcccagactcatttcagaggaaagccgtgtttgttgtcattttgtttctctcttctcccaagctgtcccttcctgtcctcccatcttgcagggccgactccaagccctctgtctcccaacccagacccatggtgtctgatggcattttaaggtcactgctgcactgtgtgggtcatgacagcagtgacttattctcagccaccgtggtgcatctgtggtctcctaccccagaggcctgcagccttgtagaccaacagttattttagcttgtaggtcatcccacgacaccccccccacacacacacacatacccggagcagcttttccacagtctcttcccaaattgggaatctcaaacagatctccggccccatcacagaaccatcttctctctcctcagagagagggacttcgggacagtgtgagctcacagtgggctgagcaagtgaatgctgctgaggtcaatagctggatctctgtgctctaaggctcatccttgtcctagctctctttacgcccagtccccctggaaactgtaggtcacctagcacatagctgggcttctctctacagaggggaagtgacactgacccaagaggtgggagagctactcccctagctcaacactcctctgctccagaataaacacccccagggaggataacctgctcatcatggcagcctgctccagggtgggaagaacagagcagacccctcagcagatagatgagcactgaggcttgagagttgattgttatctcccaatgagctagggggctcagtcaccttcctgccactataacaagtatctaaagcagtcttacaaagagaaaagctctatcttggcttagagttttggtgttccagctcacaatagcgccatccttgctttgggtctgggacaaagtgcagcatgggacaaaggatgaagtagagctccaccacttgctccatgtgtcaactacttttctcattgctgtgacaatagcaacttaatgacagaagggtttgccatgactctccatgctcacatgctactgactgtcatggagcagaaggcatgtcaagggagtgtgaggtggccaaacactgtgtgcactgtagagagccaaaaagagaggtgtggtgccctgcttcctgtcccctccttcctgctttattctcttcaagactctaccctgcagggtgtgtcattcattgggggaggggccgtctgtcctcagttaaagcttacacacttgcccacccaacagtgtgtctcctaggtgattccaagcccatcgcgttgacggtgaagactaaccatctcagttcacagctagaagatgagacaccagcctcaccattcccttcaaagacgcatcgcctgtggcacccctcccccattcaaagacgcatcgcctgtgacaccacctctcccccattcaaagacgcatcacttgtgacacccctcccccaaacatccaccatttatctaatgccatgctgggaagcaagcctttattacacaggcctttaggggaccggatggagtagctatgtaataaaagtttgtccgtgccctgagcatgtgtatagcattgagagcaaatgcacatgtgtgcacttagagatcttgggttgggcacgttccaatgtcaagaaccatctcatctattttgcgcgcgcatgtgtgtagacagcatgcttttgggtgtggaagcacacacacaggtgtgcccaggcagtgccctgcacactgatggtcagaggatccctgcaggactttgtccttcctttccagcccgtgggtcccagagactgaacttagctcattgggtttggtgacaagtgcctttgcctgatgaaccttgttgccttgtgaaagagcttaccttgaatttgcagcaatcctcctgcctctgcctcctgaagggattgcaggtgccaccacacctcccttcccctggcctctccggggccataaaggagttttgttggttgctgttgtatttactgtttctgccaatggcagcatcatcttttgaatttaaaagtacaaaaaccgcttgtgaaggcttaggctttatcgttgctctggacactacacattgtgatactaatgtttagaaaaggcacaagcagcataaaccgttcagtgtggactgcagctctgtggcacactgaggtcctggggtttgaacttggggctttatgtatgccaggcaaggttccctactgagctacttaggcaactccttttatgtcactttgtgcacctcctctcctaactctgaggcttaatttctcatgtgaaatatctgacaaacgctaacaataagccccgggcagcattttgatatttgaagttgctggatacatggcttctatggaagagacggcggcaagttcccaaggagatgcagtgttgtttcctgcaacattcccaagaactcagctaagaagaaattattattattattatttttacttttttaggtagcatctcattctgtagcacaggaactcgtatagcccaaacagacttacatcagtcctcctgcctcagcttcccaagtgctggagttacaggcaagagccaccactcccaacgcagatttaaagagttctctttcaataagtctagtagagcaatttgtaaacagcctattagtttctattttttctttttacattttgataagtgtgtctagtatgcatgcgtgtgtgtgtgtgtgcgtgcgtgcgtgcgtgtgtgtgtgtgtgtgtgtgtgtgtgtgtgtgtgtgtgtctggtatgcattgtgtttgtgtgttgggggtgcgtgtgtgagcatgcatgcagagtccaggctgatcaggagtcagcctcagctgttcttccactttattcaatgcggcaggacctctgaatcaagtccatatggcttccctgcagaatagccagactcctctcccgccagcttgccgtgggatccctgtctcatgctctgagctgcagttacaggcaggctgccatgccccaggcatttctaggagtctgaactccatcatcacactagtgtggtaacctcttagccacagccatctccccagccccacggtggtttataagtgcgcactacaacttccagagtgaatgagaggttcttgtgaacgacattgtcttaaagcagccacactgctctctgcctcatctgtgccaccgctagaagaatagtcaaagaaaagcacccagtatctagggaaaagtgaatcgaattttttgttttgtgtgattaacacaaagttttctcactttaaatacatccccaatactacatggaacatgcctatgctaaaaaatcatttgttgttggtctgaaattcatgcttagcaggacattgcctggcaattcttacaatcctgtttgcaaataaataaataaataaataaataaataaataaataaataagatttttaaaactcgtgcgatgtagccctggctggcccagttcatggtaatcacacttcacctaagatttcaggtgtgcctccagactcctgtctgtactatggtggctctcatttcccattacctcttagaaggaatttggccagtctgtgtctaaacctccagaagtttttcatagcttcttttcagttttcttgtatttggtgcacacgtatgtgcctgcatgagtgcagatgcccagggaggctagcagaagagccagacctcttggagatggagttgctagcagtcgtgaacggcagataacgggtgctgggaactgggtcctgtggaagggcagaccgtgcttttaacaactgaacatctctccagccctctccacaacttgttagtggattaaagggccagggtgcagcttagtggggacggcagggcctagaacttgcaaggccctgattctatctgcagcagatcgagaaggaaggtagaggccagtgtaccttatggttttgtgtgtcagcttgacacaagctagagtcatcagaggaaggagcctcaactgaggaaatgcctccaggagatgcagctgtaaggcattttctcactgagtgatcagtggtggagtgtacagcccatggtgggaagtgggctactggccctgggttctacaagccgggggaagcaagtgcagtgcacaatcttctccatggcctcgcatcagctcctgccctgtttgagttcctgacctgacttccttcattgatgaacagtgatgtggaagtgtaagccaattaaccctttcctcctcaactggccttttggccttggtgttttctttcgctgcagcaatagaaaccctgagacaggggaaaagaaagaaggggagaagacaccctgacgcacggctctccaggaggaggttgatgcctcccctacagagtctgttttagtcatagtccttagttctgactttttagagaaaaaatcccagtggtcctgagagtcactttctgtcatgtgacacaggcattaggcgttgctacaaaaattgaccctgagccgggtagtggtggcacacgcctttaatctcaacactctacaggcagagacagtcaattctctgtgagttcgagaccagcctggtctacagagctagtttcaggacagcctccaaagccacagagaaaccctgtctcaaaaaccaaaaagaaaaaaaaaaaaagaaagaaagaaaactgaacctgagaagcggatggatggatggatggatagatggatatgggactggtcagatggctcagtgagtagagtacttgccccaggagtcccatagaaagctggctgtggtggttcatgcctgtaattccagtgctggggcattgggggacacacagcaaagagaggcaatgtgcacacatacacacaagtaagattttttaagtgtaataaaaatatgaatgactagatccccttcatcctggttctgcctgcccagaaccaccgtggagaacatgctaaaccaaacataaacctagacacatgaaataagatgacaggagtaacagggtgctccctgagaattgacagcgatgcaaaaacaaaacaaaacaaacaaacaaaaaaaccaggcactatcagttgagccttcacaggtggcttgtggaggaagatctgagattcccagtgccactgccgctgtcacagtgttcttaggggcacacaataggcttcttcttgtggtgaccctgggctggaccaaggggcaggagtcttctgggtagggcaatgcatgctggggctttctgtctgtgacagatgaatgctctcactgattctgacataaacgtcacttcccaccctgcttcggtaaaatgagtgaattaggaaagatttgttgagagttggtggtggaagcctgggtatggtggcccaaggctgtaatctcagcacgagaagaggaggcaggaggatgacctggaggcacagggactatatgaggcctgtctctgcaagaaagaaagaaaaatacaaaaagaactgagattttgaaagtagaaaactatggaagttagaaactgagaacagttgtgtatttataagggcgtatttagtaggatcttatagtagtaatgtaaatcaaagaacacagaagtaaataagggatatttgtatccataagctctacatgaggtaagcaggctttgaacagcttgacaaatgaactcaaatactagagtgttttgccctccaaacaaatgagttgcaagtgcacttttgcggaaattgaggttgcttccatgacgcaatccacggggtctcttgtgaccaaccacgtgcttagaagctcacagatgagattcagactcatgcctgtcatacaagtagatacctcaccagaagacaggaaacggtaaataaaacctagcttttaaaggcccttgcatctccagttaaaacgaggcgttaaaatcagcatattagttacctttccattgctgtggcaaaatacttgacaaaagccaatcgggaaggaggggttcacattggctcacagtttgaaggatctagtccatcgtggaagggaggcaggcagcgtgagcacaaggcatctggtcacaccatgtgctcaggaactggagagacaaatgctggtactcggctcacttccttatttggtctaggaccctggcatagggaatggtgccacccacgtgtaaggcggctcttctctcttcagttgccccgacttgaaactccctcacagatgtgctggaaggtttgctgagatagcgattctaactccagtcaagtgaacaatcaagattgatctcacaccagccttggccagtgcctattaagtgctgcgtgcgctcaaagatgatccgtagtccgtaaggctaagatttctttatttagataaacaccatcccaaacgcaagccagagcgtgcctagaggccgaaagctagtgtggccaaagagaaggggcatccacgtgttcgtggcctcttaagaattctctccgggtcatcttcaacctcccctgaccatgccctcacaggcgcggccaggcacacctgtgggggctactaggaggcggggctacagtgtctccctacaagtgcccacatgtaatcccagacctggggaggctgtggcaagaggattgcaatgagttcaaaactagctgttccaggcaagccagggccacaatagtcagacccagtctcaaaaacaacagtaacaacaaaagtaacactaaacagatactttgtattagaaagttttaaactatagtctgagctaggtgtggtggctcctctgtagtcacagaatggaggaggctgaaatgaaaggatttcagagggtcctgggcgtcctcagcttcacagtgagtttgagaccagcctaacctcagaacgaaatggaaaataactcatgagggcagaaaggacggaggggatgacagcagatgagaagcttcacagcgttgtagaaaatggaaggtgtgggctgaaagctgcactattgattcacaaagcggacaggttacttctcaggctggagagatggttcagcagttgagagcactggctgttctttgagagaacctgagttcagatcccagcacctatgccaaatggcttccaaccacttgtaactccagctccagtgatctagaggctctaggttctgtgagctcacatgcctgtacccacaggcagacacatggttttagtaacagcaacagcaataacagtaatctttaatttggcaaagcagagtttcaagcaaggtgcctgctgggacacagtatccctgctgacctggtgaggctcagatttggggtgagtgaggagtactaagaccaggttcctacctcagtggctttctttgcaagctgtagtcaggtgacccccccccttcctggaggggtgacctggagaagcttagttcttccttattgttgtcctgggggaggaggaacaaaggatgtggagtcttggcaacaggaaaaaacccagaggaaagttgtctgaatgcgaaagtctgccctctgggactggacacgtagctcagttggtggagtgctggcctagcgtgaaggaaccctgccttccatctccacaaccccctacagccaagcatggtggaggcaggaaaaggtaggaaaaagtcaaattcagatatttagcaagttcaaggctatcctaaactacatgagactctctcttaaaaaaaataagagaggaagaaagggagggagggagggagggagggaggaaggaaggaaggaaggaaggaaggaaggaaggaagggaagaaggaggcaaacaagcaagcatctttggaaagcctggctgcatcggtatgcctggaagcttccctggttcctgaacataacgatgtcttacagtatttatacttcatggttcaggccatacttggttctacttctcattcattccagcctttgttcaccatctggaaaacttggagataaaccttaagaagaaaagtaattagatgcaatatgtctctttctgcagctactttagcccagggtttgttaccagaaaattcctgaagaagagggtggcaggatggttgagcaagtaaaggtgcccacctccagcctaatgccctgtgtcagatgccagggacccacacagtgagagaaccaactccccgaggttgttccctgacctacaaacacactcacacctgagcattcgcacatgtgtgcgtacacacacacacacacacacacacacacacacacaccatggtatgtacacatcccccccaaaagaaaaaaaatgacaaaaatcttttttcctgtagtacaaaacaagaccattcctggcagagtctgcaatgaggcaggggcttgaaagcgtgacactggccccgtttatttctccttcgaggttgaccttgctttctaggccccaaagcctgctttcttactgacatagtttgatgcatcacgtgagcattgtcctttgggagtgagacacgagctgccaccatctgtctgctcatcctgcatctgtgtccaggataagtcagtgggtgcagacagctttctcatcgtgtcaggctacagctgaaaaccactgtatggttaagatgggccactcctgggcacgggctgtcaccaaatcactcctgaagagagcttgctttccacgctctgtgcttctccttggtcatgtgtgaccacggtcaaagatgccttcctgtggccatggcagcgggactccctcacagggaggagcaggaagaccagggagggtttttattttatttgcatttttcaaattatatattttaaaattttcatccatgtatgtgttgtagttgagcacatcccccaaactgtgtcccctcccttttctccccacgtctgttcttgccagtcccctttgttcccctggatagtttcacttctattttcctaccctatgcacatgtatgattttatataacttatacaaaatctagaaaccacaaatgagaaaaaatgcaccatttgtctttctgagacttaatttgcctaatcattctctccgttatttccatttcctgcaaatgacagaactttcatttctcttcatggatttaagaaaaacaaaagtttggctttacatttttgatcctcctgtctctacctcccaagttttggaattgcaggcctaatcccccatacctaacttacaaaataggtttaaaacttgaattcagtttaaattcgggaatcacgcctgctagtattttttggtttctttgtttttttccctggcacactttatttacttattatcagtgtttgcctgcagggcagaagagggcaccagatctcactacagatggttgtgagccatcatgtggttgctgggaattgaactcaggacctctggaagagcagccagtgctcttaactgctgagccatctctctaagccagggctggtagtgtttgtttcacagccttaatctgtaccgttccttgggaagctgcatttcccaggcacccccctgagcaactatataagcttaatggacctcttggtaaaagtcttgtgatgctacactggataagggtagcattggagggcggggtaacgcgtcttcacttccatcactgttggctttaaaacaagtgtgccaggcacttaggcagtgaggagaagactggggagaatcaagggttctctttgtgatgggtctgattgcagatactgagatcttgtattacctgagtagatgtctcttaatctccttgttcctacccatggctgaacaatggtgtttaacggtggattcaaagtttgggtgtgtaacatagttttgaactccatagccaggtgtccccggttgtccaaagaatcagacattttcctgtatcgccacaactcccagtcgagcttaaagtaagagggaaggtcagtgtccatcctgagaacctgtttggaatttctgcaggggatcaaggttacttttagacatttgacctgcacaggccctcctctgttggggaaggtcattctcttagctggagatggacacacagctccaggatggacactcagggagtagtgagggggaaaagccaggcagattagcagaataaattctgacaattagcagggtgacaggtgtcaaagccagactgcagtcacatccaggtgtccatctttacaaagaatgtggtctttggtagactcccagcttgtcagaagatttcaatttgtagcaagacatataaggccatttataatctgtcctcaagtgatttcccaggttcgtcttgcttatgtgctcttgcccaggggtataggtctcctctccctctctgaagacagccatcttccttcatgtcccacacctttgcagagtctatgccctgtgcctggaatgctctctacttcattcccagccatctttgattttttttttttcagataggtctcatgtatcccaggctgattacaaactcactgtatagctaaggatggtcttgaacatctgaacttgttcttcctctaccttccaagtgtgggacaacagatgtgcactacctcacttggtttatgtggtgctggggatcaaacacccggctttatacacaccatgcatgctctctatggactgagctacacccacagaccaccctccccgtcaagacccatcttcaagaaagtattctggccaggcagtggcggtgaacgcctttaatcccagcacttgggaggcagaggcagaggcaggtgagctcaagaaccggacaaaaagagaaaaagaaaggagacaagccacagatgagcatggcaggagcgagaggaggctacagacagacacagagcaggagccatgatgccaagctctagatctgcatgcagaaacaataaaacaaacaagccactaatgagagctgcacatacattcttccctctgaccattacaggcaagtatgggggaaacgtcacttcaaatgacttaaacaaagacttaagagagcagacttattgacctcaccactgagacccccacggtgggtgtggtggccagaccagcctgatggtgacattttgtggtttttctccagctacatgaagctgcccctgcaatcccaggctcttagctccttggatccaaggagcaggaaaactggacccagccctagccctgtgcttccagcagcttgtcagctctgactgggatggtctgcttggactggccacccactactcatgaaccaaaaatgtgaggtgtgctgctttcccagaggccaaatgggaaacattggctctggtggagtgaagagatgctgaacagccaagaaactattacacccacttgtaaaaagctacaattgtctcaaccctgctgttaccgctctgaaaagggaactctacgtttacattttgtcatgggtccctgaaatggcatagctaatcctgaatgtgacttacaccatgtttaggaggaagcagctttgatttttttttttttttttttttttttaagacaggctgtcctctgcttcattcactatgtagataaggatgaccctccttaactcctgagtatcctacctacctctgttttccaagtgctgggttacaggtgttccccaccacgaccaccctgcaattggaagattgaacaataaataaaaatagtagcagttttcctgctggagaaagttggggtagctggaaggaggaagttccagtcacagagaagaggatcctagaaacacagaggcgccccaagtggctggcgttttaaagtgcagcggtgtgtggtccccgcccagcaggaaggacagaattcagtcaataaatacctcctgaaagaatgaataaacaaatgtcaagtcggttgcaatgttaggaaaagaatatgttttaaactgtattattccaaacaaccatttcaagctagatgtcctatgtccctaccgttttttttccacttctaggatgctgacctaaccctgtaggcggttagggttccctgatccttatccagctggtaacaaagtaacaaagccctccacctcccttacgtcagagcgcagcgcaacaatctgtgaatcagagagatgtttctaagaacatgttttctgattgtttactgtacaataatagcctgctttaattaccgggatgacatttctaagacctaaatagagcatgcctcaattgtgtgggagttcatcgctttggtgataaaagagaaacagacggtgactcaggtggaacattggtttcgttttcagtttgtgtttccttgggctctgcatgtcagggcgtgtaaggagccaaggcagaagtgcactgtaggagtgtgaaagttacagctaaggctctgtaaagtcagagagagagagagagagagagagagagagagagagagagagagagagagagagagagagagagagagagagagagagagagagagagatcccccctagggaagggatgctctcacacagtgacctgagctcgtaacattttgataccatatcctttttaaaaatgctgttgagatactaggtttgtgaccagggattatctctggaattccatgtagtttagggcaaatgtaagaagaaaaccctccagggctgtctgctgagcacagctcctcctgctgtggccccacacccttacatggccagcttgtagtaggcacaggaaggctaagaagacatggttactcctcagagcaactctatacagctgggatgtctgggattaggacaagagatgctgcatccagccaggcaggcccatgggacactgagagaatacaagcctcttctgtgactttagcatgactgaccacccctgtgtctcttccgtggaacctgtgatcaacaaggaatgtcaagaaaaaaaagggcttcttaacataccaaaaccacacagcagggaattttaaattttataatcacagatgcttctgctttctggcaattttctatattccaagtgtctcttctccatgtagtttactgtgtctttgctgtttaattattgtacttattatatatgtatatatatacatgtatatgcacatatcttctttttcttcttcttcttctctcacagtatagacaaaacaggcctggaactcattatacagctcaggctagccttgaattcacaataaccgtcctgcctcagcactctaagtattgagattgcaaacatgcaccatcatacctgatttgtatctgtgttctcactatgtagccctggttggcttggaacttgctaatgacactgcatgcaaaggggtgcagaaaagaagctgctgacccggctgatccgttgttagggagagtgcataagagagagaaaatgtacatcggtaccgggaagagtccagagtagaaagaggaaaaagtagattggacatggccaggcttatggaagcaagatcgtgggaaagaatagtggaaaagcaagctagcaagagagaagaaaagagaggagaggagaggagaggagagagagagagagagagagagagagagagagagagagagagactgagaggagcttgggaagagtagagaatatcgggttaaaaggagggtgagtagctgggggaagggagggccaggagactggctgtaatctggtcagtaaactattattcctagtgttttcactttttcaatgtgtgtatcttgatacgtattccctgagtcagccctgtaaaggacagacacttctgctttcatttcaatgtcccaggtcaacaaatggtggagctgggactcctgatggctttgggggttgtaacccagttaacccagggaggctgagcctggagagtcccagggctgtcctgtccgtgtggaagcaggcctgagtctttgctgctgtcagtgaggacaagcacactgaggatttccttccgggctgcagggctagcaggaccagttcactgaggacttgctagtccatgtcctacgtcagaaacggctcttcctccctatgccccttctcgtccttggtacctggcaggtgtttcatacacgctcatgcattcattgagctaaggttctggctggacagaatcctgatccttcagtgccgggctgggtaatctgcaatggggttctttgaaagacacggcttccatttgcttttacatttatcctaacataaagttacttcgcctacccctgctacagaacatgcgtctagtcagaaatctgtaagtagaggaggaaaagaatcacccatctatggttccaccaaccagaattagagtcttgtaataagcagagtatctttttaatcttgttatttatttttcattaatacctttactgagtcgcaactgttctgtttataatatgttgcctattaaaccttgcacattcctacagcattctctaagttacatttcctttataaacaaatgcttacttttctctttgctgttttgtcaagttgaccatctcctgctggggctttcaaagtactgggatataaacaggttttgtgtgtctttactttgagattttttttttttttcattatatagcccaagttgacctcaaactctcagcaatcctcctgccttagcctcctgagtgctaagattgtaggcacatgtcaccatgtccagaattaacaaacatctttttaaatagtggcagagcattcaaagaatagacttttaattaactttttcctctcaaaagtgggtctcatgtagcttcaaactcgttttgaaaccaaagccggcaatgaactcctcaccctcctgcctcagccggccaagtacttgcacataccaccacacccagcaaacaaatagtcttttttgtttgtcttttgtttttgttttgagacagggtttctctgtgtagccctggctatcctggaactgactttggagaccaagctgacccatttacctctgcctcccaagtgcagggattaaaggtgtacaacaccatgtcctgctcaaaatacagtcttatatctttgttggcacatatcaattacacataacaacaggccttgtaggctgttacttaataaatttccaccttttcaagttctccattattcgagactgagttctgttggcttctccagttccttggtggtgttccattgtccatttgccacagccacagcaatgccacagccacggcaatgtcaagcctcaggggaaaccctgcacccatatgtgaactggtagagccgacttagtgcttggtaattaagctggtaacctgctctccttttttttccccctgttattctgatgtccccaacatgtgggttctcaaagccctctctttgtgacatccaccggctatgcccttgtctgttcccaagtgactggagtctcaccccttgccaacacagtctcaactcagtttccttgtatcacctgagacaggacggccgatgccacagcaagctgttgcccacacctaagcacctgaatctccttctgttcaccaggcactgttgaagcgaaccctaccccaagttcagctttaacgaaggaatcctaaagtgtgtatgaaatgacaagatctaaagaaaaaaaatccactttaaatttcaggacataccacagcgctgcttttcgaataacttttatttcacaagaaacaggcattcctcctgacctttcctcttcacctgcctgacgatcagcagctaaccggtccacacacaccctgggctagaatgcttcctgtgcgtgtgtacttgctactgaaagaccctgtgatgtcccctaccttccagcatcacctgtgtccctggggacacagttcagactaattagcagaggctttgctgctccttcacagcctgtcacctgctccaccccggctcctctcctccatgcttgtcttggaaagtctttgtttcggttcatcgactgtgcagacatgtagtgttgaactggacaaggagttgggaccgggcagagatgagccagacacgcatggctccttgtccacctctgtgtgggatttcccctgtcttcctttgcctataaaacattcataagccacttgttcatcaacacttgcctgcttccctggacacagcccctctgccctgtgtcagcccatattacatgggatcgtcactatcagtctccccaagagctgtgatggaggagaactgttttacttcactgtgacattgagctcctggcacagaacatagtaggtgcttgttaaaatatttattgctggatgctgttttatatgctaatttgccacctgaagatttttaatgtcctcaaggttaaggagtgtccctaccctgcccctgtgagcacagagtgtctgagcacagtgctgagagcagtgcctggcagtgggacatgactcgatgagttgactgataggtacaaaatcacgggagtgactcactctgctctcagtttcaagtacgagctcatcatctgatgacttcagttcctcatattttgggaaacagaataaaagtctaaaaagccctgcttggcttactcagtcaatagcagggcttatgtttgtggttaaagcaaattagggaataatggccaatttggcagagaagacagtgtcacggaaggctggcatttttcaagtgtgaatcttctggaacttcaggagtaagagtttcctggtaaggtcaagtccagaagcatctagcatccaaggatgctgtgtgagaaggacctgcttcctagcacagaccacagagttcgagaaaataaagctaggtgaagctctccaggatctgaaggatctgtattgggagaattttctccgtctagtctggtctcaatggaccagtttctctctgcccatcgggtccccaagctgctatgaaataaccattctgaggcttaataactgttacaatggtttggccaatggattaggcttcttactggctagctctctcttaattattgacccatttctattaatctgtgtatctccaagtggctttgacttactggttgtgataccctggcatcttgagtgcccagtgactacatggtgtctcctctactctgtcttccttctctctgtccctgatagagtattttctttaaattttgccatatgtaaatggactaaatgttgttaatgtgattcttatttgataactgcttttttacatataattttactatcttaaaaccttcctttttgtttagacagaaaagtggagatgatgcttctgtatgcagcaaatatgtgttgctttaattgcttgatgaataaagctgcttcagccaatggacaggcagaatttagctaggtggtaagtcttaaagtcagatctatgttggagtcaaacaccaaagagtattttcctaaccttcccaagcttcctttcttcatctgtaagatggagaaaatagaatcagcccgacaggcttagtatgaacatgaaataagagaccagtgtaattatgacctggtcgcataatgattttacaatatatatatatatatatatatatatatatatatatatatatatatccttttcaaatcaatgagttttcgtgagatgaaacttccctctggggtctgtagacatttctgataactctgggatctatgtgaccaatgcataaaaaggagacaaactgggcgtggtggcacacgcctttaatcccagtactctctctagaggctgaggcaggaggatctctctgagtttgaggccagctgggtctacataatgcattccaggacagtcagagctacatagtgagaaccctggagacagacagacagacagacagacagacagacacacacacacacacacacacacacacacacacacacagagagagagagagagagagagagagagagagagagagagagagagagtcggtttgctcttgtttcagggcctccctgtgtagcctgagtggcctggaatttgctatgtagctcactcaggctggcctcaaactctgatcatcttcctgcctcagcctcccgagtgtgtgcacaccaagatcagctgcatctctctttaattctcacaattaccttataagataaacactagcctccctttacaagagaagcgaatggcttaggacccacccagagccacccagtgtgggtctgaactcagttctaactatagggactttcttcttttaatatgatatttttattcattctttgattttttcttccttcctttctctctctctctctctctctcttttttttttttgtgtgtgtgtgtggggtgggtgttgaggctgagtttctttgtgtagccctggctgtccagaactagctcagtagaccaggctagccttggattcccagacatccacctgcctctgcctcagagtgctgggattaaaggtgtgccccactaccacccggctttaactctttgataattttataattgcatataatgtaatttttttactatactctcccccactattcaactcctcccagatccactctccatatccctccaattccatatgtatgtgtgtgtgtattatatcatattacatatcccacaaagttcatatacacatgagcatggggacatcggctggagcactacaaggggctacactgttaaataaaactggctctctctcctgcagcaaccgtcacctatcagtagctcctcagtcaggggtgagggctagtgagccctccccgacctccatgctgggatgctgactggcttgatctgggcagattttgtgcaagcaaccggaacactgtgaattcatgggggcagctgtccagtcatgttcagaagacaatttcaccccattcctccccggcctctggctcttcaatattttcccctccctcttccacaacagtccccgagcctgtgtgtgtgtgtgtgtgtgtgtgtatgtgtgtgtgtgtgtgtgtgtgtgtgtgagagagagagagagagagagagagagagtgagtatgtgagtgtgcatgtgtgtgtgagtgtgtgtatgtgagtgtgtctgtgtgtgtctgtgtgtgtctgtgtgtctgtgtgtgaagatgtctcattaatggctgggcactgcatacttctcctctgagctctgactggtgagtttctctgttaatccatctactgagtgcagacactctgtcatcccaggtgcctgctctctgctagccccatgtcatgccttgctagccagatgccctggagacattgtcaaacctccttcttgctttgttttgtaagacaggatctcactctgtagcccgtggattaaaattgaatgtgttgtccaagctggcctcaaactcagtatgctgtgcctgccttggctctcgggtacgggcccagccaagttctctgtcttacagtcagttttccttcaccttggctgccatcttggcaaacaaagcccctccccaggcagagggcaaaaagaggctcaacagtccagaaggctgaaagtcctttagttctgaggccatggagagtgacctttcccagccccccatgtatcccactgcagttcaaaaagtagggagctaaccctgcagccagggtcacagtaggcacttggtaatagtagttgctctcttttttgtttgcttagttttctttgagaggggggctagcactgggctgagactctgtgtgtatcccaggctgcccccaagcttacagtggtcctcctgcctcagccttctgagtgccaggattacagctcttattattcaccaaagtagcttactaatattatctaaaaaggataaaaaaaaaaccaaccccccccaaggaactaattcccccagggttgtaacatctgacttacatggtccagcccaaacccagaatgtatttggtatctttgtccttaaacattttcatatggcttacattggaattcaacacatccttacttgtacaagatagagcagtacttgaagcacctggtgtacacagcagatgacccccctttgccctctccagagtcctgtgcccatgtttgggaaaggtggaagcagaggacttccagggtctaaccctggtgtcacgtagttctggaaagcagtggcacctgaccctggcactggccccaggtacagactggagtcggggataaccagcccagtatccatccatgtcacggccgccagtatagccgtgccagcgctacggcacagcttgagccacggtattttgccaggtggtcctgcccgtcatcgttctctcatactgaggactagatttccttttccataatgggcagacagagtctcaaaagtagagggaggaggggtcaaagggcatgctccatgggaaaagcacctgcagttttttttctttgaaggtagaaccaagaccctcccctaattccattgaagcaaggagtgaagcagtagttggcctctttccccacaaaaaaagactaaagtttgtctagcatgttagcaaaatgttggtagttccttagatactaaatgtagagtaacaactgagtaagttacacaacacccatgagctcctacagaccacgggaataagtcagggcagtggttcctactgggaggcaggagtagatgacatcggtagggccatatacataggcttctaaacactgcaggtgacattctacttcttagacagggtggcaatcctcagtatattttattatttaaatgtacatatgtgtcgtatatctatcagaatatgtgctctgtcttacaataaaatggacatgtttttaagaggaaacaatgatggtgacaaacaccatgcactacccagcgataagcaaatgaggaggtctgaagtttgcaaatataaaaccgcaaccaaattttaaaatcatgtgtatgagggagaaaaaaagcaggaaagacaggtcaaaatactgatggtctgagattgtaagtaactttttctcttgccttttgccctaattctcataatggcaaaatattatttaataaaagcttgcttttgtttttcgagacagaaccttgctgtggagcccaggctagcctccatctgcttgctgtctttgcatcacaaggtggcctcacacgctctgccttctcccgcagtctcagatgcgttgggatgagaagcatgagctgccatgtccagctatgaaccttcagtatggttttagaaactgtttccaactgacttaacatctgttatgtcatctgatttttataccaacgctttcaggggagttcaccttagataaccacttcgtggatcagcaaactgaggtagtatgttggtgacttgcaaagtcacccagtgtctggaggtcaacctgtgggcagttctcagacctacagtgtcctcctaaccctggagcttctgtgactgcatctcagattcctggagtcccagggtccgctctcttgagtaggaatagctgctacctagatttggccccgtggtcctaagttcatgtccatatacacgatgtcctcaaaagatgcgaccctgagctctggctggggacccacatgaggtaagtttttttttttttttttggtttttcaagacagggtttctctgtggctttggaggctgtcctggaactagctcttgtagaccaggctggtctgttttgttttgttttgttttaatgttgggagtgaagtggaaaagagaggacgggctgtgtctgatgcctctcagccatagtttctagagaaatggggctgcactgttccatgcaaccaacagcttttcccagagccagctttcagctctcggaaatctgcaaggcagtttgggtggctttggggaagacagtctccatccaggaacctccataacaaaaaagtgggaaccctaaaggagggcccacctttctcaagagtgaagaaggcagaactagaaggcccttagaatctccagcccagcccagcccagcccagccggctttgtccctggcatctagcactagtatctgattagttgtggtggagagcaaggcttactcctgttgcttttagggggcgacaggggggatctcatcccagccactctcatgattgccatcctgggtgtcaccagatatcacccttagcttctcgctgatgaaggggacagagggtaccccagaaagccttcctgatccacaattaaagactggctgtgtgcctcattctcaagtgggtcgttttttgttttttgtttttcccctgacccagggggtcactggtgctaagtacagcatccacagtccactcagggctcctacacttcagcgcccactgggctacccttatcaggagggtgcacttcaagggacttaaattagtaattcccacattcagtttggtcaaaagcacgggctgggggaaaaaaaaaaaacacccccctgccttcccaaggtgaagaagtggggtcaagacccgtgcccagacaggccagccgggcaactcaagcggccctggatggcgctatctcgtttccagagttctctgagcaaatacagcctcgcagtacgaagaacacagttggggaagcagaggagtgtgggacgagatcacccactcaattgcaaaatcctttaaatatctctgaactttcccggttttgcttttggctccttgcagtgtttttgtgtttagtttttggttgccacgaggggactgtttttagctgcctggctcctcctccctcccccttttaatttcccctattcctttggtacaagcctcagcatgaaatctccagttcttatctcactcagcaaaacagaccggagctgacctgcatacgggctccccggggcggttctctggcgaaaacctccacaacattcaaatttccgcgtaaccctctttgactggggattaacccctgaaatcactctagccagggcttactggagaggcatgcctttgcccacgtgtcgggaagcgatttgggtgtcggggtttttcttgcccctctgcgtggcgctacccatgcttctggggcgagtgtgcgcgctaaacactagtggcattaagtcagcgtaaactgaggcacgagggcactcagatattgacgacttcctttggcccagtttgtctaagccttttacgactctccggaggagcctaggggaccgagacaggcagaaagtggcttcggtttgcctgggacaggagtttctttcaagttgggggttgggggccggatttctccctgaagattcttatcgctttgggggtttctgtaggacagggaggcggaggatggccgactctgagccctgtaaacaatcgagagtgtttctatccaggtgcgacttggagattgaaagctaatgattagcagaaagacgggggtggggtggggtgggagccaccacgggaatgacaaggtgccctggacgttcctcagacttcagtccacaatacccttccactgttatacgaaggcgctggtctttttgcttgggttctcaggaccctcggctgagccttcctcttgaggacaggaccgaccgccacagatctggctcgggtattaatggaaccgcagtttaatccgtaaaacaattaaggatgtctgtaggggttcacagcggcgcggggcggggggcgcttcatgcccccatctccttgtctcacggtacagtggtgctgttatccagggcagcctgtaccgagacgggacagataagtgcagatcacaaatgactttcatttacaggcacctggcattcttcggggttgtgcggacacgcccggagtttacctgcctgcaggttgactgaagggcgggcggtggaggtgaggagcagagtgtgggcgtgggagatggagggtgtggccccgagagccgttaccaaggcaaaaaccaaagcaaaacacccgcccggcgcttcccgcgcgaggctactgcaatcgcgtcagatcctggcaggatctacgaggatccccgggatggaaccacctcaggcttccccggccggcgtgggcgggacttcgggggcctccctggcgggcaggggcctgtggaaggcgaggctctgccttggacagaaggaacccgggtgcagagaacttgattctgcccaaagtgtctgctcaaaggacatcagttccttggggtgtaatgcgggtgtgtgtgtgtgtgtgtgtgtgtgtgtgtgtgtgtgtgtgtgtgtgtgtaaagagagagagagagagagagagagagagagagagagagagagagaccttccttacgaccctaacaatccaggtgaaaggtgttatggacaattccttcttaccccaaactatcactctgagaccttccgatcgcctccccctcgaaggcaggtgttagcaggtgcctctgtctttacatcccggcgccctgcccgacgtgtgcgcccgaaggcttcccagaccgttgtgcgagccctgggccgcattccttggttagctatggagacccgcccggggtcttgcgctcagccgaagactttcgaaattactggatcagaaccagcaaactgttttcaacgttcaaacccagttctgctgaggcctcggcttgaaactcgagccctacgtccaacttttcccgccaccagatttcagggcagagggccccacgttccggctctaagcagtacgtgctcagtccgggcagccgggccccagcaggactctctgttcctgcagacactagaaacctggagacggtttttctctaaatacttcctgacatccaggcggacccccgccccctacctccgccaaggcggggcgcgtgaggatcaaagcgtcctctagccgggactccctgagccgacgtcttttcccagcccaaaggtggcctctgatcgctccagatctttcctctatctacactcttgctttcgcaaatgttttgtggttgttattgaaaacccataaccaagctgacagcgtctcgtcactggcagctcgggttcccagcgagtccggaggccctgcgtgtgtggggggcgcgagcttgggagactgggttaatccacggctgccagcggggcccgcggcggcggaggtcacactggcgggtaacggtgtgggttcaccagagggtaactttgagcacctccttcccgaggaagattgtcacctacccgttccctgccccctccctgagcaaagccgctggccagagaaggcgctttttcctgaagttttagaaaaatgaccacgcatttttgagaaaggtcgtgcccgctacccagcctcacctagtctgggccacctccaggacccgcctcccgagcccctccccctaccccaacctagcggagggagagatgccagggcggtggagtcatgccgctggcttgggcaccattggctcatgcctggaacacgcagcgacgaatacgcacggctggcggtgcgcccgggcgactccgggcctgatatggagagagagggcgggtgtgtgtgtgtgtcccgggcgtgcgaggcgcgcaggacgctcggtgaccgccccttctcgcacttgcatcaccaacccgaggtctccacccacccttagccccgccctcggccctcctccaccctcctctggccagttctccctggaagctattaatagcattacgtcagcctgggattggtaacttggagttaagctagcgcgagggctataaaaggggtgatgcaacgcgctctcagccacagtctcaggcagcgagacgcgctgggcacggtgcttcccccgcggagctgaccggtcagcccgcgctccggcagagccctcggtgctcgcccgccagcgggacagaacgcccgcctctggccgctctctggaccctggccgccccgagcggagattggaggtgagtattagagccacgcggcggaaagcggctctcccctgctcgtctcccctctagtgaccagtcccgggacccctgagccacccggacccgagtcctattctgccgcgccacagtcgctcggctgaactgctccttgccgctgccgctccgagctgggacaaagtttctagtaaagtgaaagaacgaactttctcttttgagtcgtgaaagatgcccggggacggaggagaccgcgcgctctcagcctgcttctagagaggtcgcctgggtgggtgctgagtgctgcttggtgcgcgggggtgacccacactctcgggatcgcgggtcactgtgtccctcacctggtgtccggacgccggagccggagcgggtccctcctaggtccgcgcggagaggcgcggtggccgcggctggtggtagcgctgctcccggtcccgagcgaaatgaatggggaaggaacgctcggtccgaggtcccggcacagccgctggaggtcgcctcgcgctcccgggagcggagctcactgtgagcgaaagtgagttggaattagtttgtaggcggcgagcgctggtatcgcgctgtcccggggcggactgcggagaggtctcggcacccacagaagtcgagcggctgggcttggggcgtcagcaccagcctctcttgctgttgtgacttgctgtggctctgtcttttttttttttttttttaatcggtacttggggtttttgtttgttcagtttttttgtttgttttgatttgttgttgtttggttttttgttttgtttttgctttgtgtagtcgaagaactgcggggaccagatcgaacgggtggagggaccagggtgtggaaccacttgaacacgtgtgtgtgtgtgtgtgtgtgtgtgtgtgtgtgtgtgtgttggggggttgttgttttgtatttttgagacagtctcactctataattcggattgtccataaactcctggtgatcctcctgccttagccttccaagtgctggaattacaggccaccacgcccagcaccctgtgctagagccctgtgctgtgtgggttagggttagggttaatacggccaggttttgaccgaagattttcagtttttagaacgaaataaccgaactaaaaggagccaggaagggatctggagttaagagggtggctccccacccagtgtctctgagacaggaagggaaggggcttccctctccatctctgcctcctacctttctcccgtgggttggttctctgcttcgacccgctctcatcttcaactgccatgttttaattttcctcatagccactttattttgcttaattttattatgtagatcacaggctttctcataaatccaaggagttgccaagcccaattagtctccgccttcccttgttaggttttttgagatagggtctccctatgtaacccaggtttgcttcaaactcatggcaatcctccagcctcagttcccaagtgctgggattacagtcatgtgtcaccaagagagcacgttttgcatgtagcgtttgttgtggggatcatgttaccacacacaggctcttgcctgggggcggcggttgtggttgtttctgagacttcagaggttgctgaccaggtggaggcatagcgcccagcactgtggctatctaaatcccttctccacaccagtttcttctgtgaccccttcctgtcttcattctgtcaaaacctccttgatgaagggttccaggtatgggactcttgagtcctcagctgctacctggctgaccgctctgcctgtggttggctgctttcttgagctggtgtaaagtgagcagagggtgtggtttcagcagcttggctggaccaaccaccctccagctgtgtgagtttaggctagttgctttccttcctggacctcagtttactaagtgacaaagtgaggatctgatctagacaattctaaggctgggtacctttagccagagtctgtgattccttaaggaactggctctatgctaatccaaccagcgaaggagggacatagccaggacaccacagaaactcttaagagagaaatggtttcttgtgtgaaaactcacaatctctgaagaacacacgacaatggagaagtgctgatgtcagcagagtgtcgtggcagtcacccggtgtcccgggaactcaggaccgtagtacaattgtggcagattgacctgaaatccttgagggttccagttaattgctgatgaacagaattaaactgaattgacagccaaatccatttccctgaggtggggggaaggtggagttagagtgtctgtgtgggtgtgaatctcttatgttttcaagtgtgtgtatgtgtgtgggggggtgttcttccccacagcctggggagggagttggcaatctcattcacaaatttcagataggaactgaaggtcagaaagcctctgactcctgaatgggtgctcagctagtgagtggcagacatagacctggagacagcgcctgatccttgcacctcccatctgcaaacaggagaaagaacaggatgtggagagtcaggaaaaggtggctaaccctctcccgactgctacacgttgctttgcagatggttcagtggaaggaagtgcaaatcaaaagtgaaatttcaattggagataaaaatctaggagctgaatttccagttaaataaattagaaaagtttcactttcttgaaaatgatgaaattgccaacaatatgacataatttctgattggacatcatgaagcagaaacaaaaacagaatttgagtcttgaagcaaatccagaagacagttttatgatgggtgtagagttaactcagctcgcccaaacccctcagacactcccctcttggatgctgggtgtgttagagggcctcagctcctgaaaacaagctgaagttttagactctgtttccctggaggacacaacctgactctaggctgactcccagatctttacagatggagccacttgaaagtcagaaagactttcttaacagctttacgacatgcttgaatccccaagtaagccccacccccagcttttcacaaaagcattccataccactgacattcctcagtttcttcctgtcttcatgctaagaaggatgttgggggggggggtcccaaacagcagactctaaaccccaagggctcattaagaaacttaactgggtggctaaagtgacaaactcaactggctcaaacgagccagtatagatgacccatcaagtcatgcacatgaaggccagacctgtagcagctctgaattccatcccttaactggtggttttgttttgttttgagcaaaattggaaaggaaggggaaatgaggatgcttgggaggaagttaagcctctggcttcagaagccagagaaacagctcccagacacgtgatcacaggattcaatgaagagaccttcagtttgggaaagaattgtaccaatttcttgagttcatatgactagtggagggcagcttttgctggactggaatttctcgagggcctccatctccagggacaggtaccctggggaggagcatcaaaagtgacctgatagagcctactgagtctccacaggagagcagccagccctctgagggtgatcctgggagacccagtgtagctcctggtggccctcacaccactcttggggaaatggggtacttgttctcagcctacctttgcttaggagaaagaagccatgggggggggggttgtgcaggcgatgtatggtcacaacacagaactaagtggtcttcaaatattgtttttttttaatcttggagaattttatgcataaaacagcccatttaaacttacgcctggatgcaggcagtagtggagtgatataaaaagactagcaattccttgaacagagttcagggattccctgggaatcgttgcctagttccccgccaccactgtttctgttccaggcttcccctctgcttcacgcccctccaaacgtttgctgtttgttgttgttcaatggagtatagtatttgggtatgcggcatataaattaaggtcatgagttctgaagccaagccaaacgaatccccacgcctggtgctatcccatgttaatgtgatctgtctaaatctcagttaactcatgtataaaatggggccaggctttacagcaccggcttctcacaaggcccaaaggagacaagatagacagggtatcctttcatgttagaggtttgccaaaaggtttcctgtcgtctgtgacgtggctgtgacgtgaccagtgtcaccaaatacagtccctgctttgggaagggtgggagtcacagctgttaagtccacagcagaagactgggtagtctagatcacttctgcccttgactttcccttgtcacgcccctgtggatttgctggcctttagaatgatgaggccacattgtttattcagttgtccaactggtcagcaggcatcgtgggcccgtgctaagcttggcttgggacagagcttgggcagtggtttgctggcttgggggagttctccaccaatttccagatgaagactgaatcccagagctgagtggcctgctctttcatgaccaggccacatcccaggtcccctctgcccctactccaagcctctccttatacctcagcactaaacaacacccccataaatccaggtctccctctcaatttggcttgccctgaagtcctttgctttgccagccttctcgttaagaagaactccttgttcccgccattaccaccccctgccaaggtctggggtgaaaaaacacacccagcttcctcattccctctgagcttcctgcgggagaaacttccgcacgagttgtggaattcaagcccccccccccccccgccccaacttcctgatttaactgccacacactatcatattggtcttgatttcaggtgtcatcccagtctctttttgaaagagtctggaaatgggattccagaaagtgctgtttttttgttttttaatgttttttttttttttctctttggggtactgaggccacattgcataatctgtataccaggcagactactagaagaacctgagaagtcaaccctcttaaactcttagccatctctgagattcgtgttttaagaatctgttttattcacaatgaggatagcataaaaaaacaaaaaacaaacaaaaaaacaacttttgatggtctgttgactttaattggcattgcttgcctgagcatgggtgtggtgttagttactggaacatggcaacttaaccggtgactactgaataaagtgacccctttcctgggtgaggatccggacctcaaggaaccctccctaacccatgccagaatgttgacaggctcagtcttacacaagtccgcttctccccgtcttcctgctcttacatcctttcagactgttgttccctgatccatgaacgtgtgtgtgtgtgtgtgtgtgtgtgtgtgtgtgtgtgtgtgtgtgtgtgtaggggggggaggagaaggagagggagacagaaggtgtaacaatcacttattctcagaactttgctcagctatgaatttctgcgttaactgttgcctactgaaaaaaaaaaaaaagaaagctgaccaaggttgaggctagcacgagtctctggatatgggaataaatgagtagggagcagtttgacaacgtgtccgcttagcaaaacaacagtaatatggtctcccttatttcctataattcctccagccacaggcaagagatgggcatgaaatggaaacaaggcagaagccccagggctgcagggactttgttctggggtgggctgtactttggcgtggttggaatctgtgccccaggacccctgaagcagtttgggcttaatttttttctttcagcaaaatgatgcttcaacatccaggccaggtctctgcttccgaagtcagtgcgtctgccatcgtcccctgcctctcacctcctgggtccctggtatttgaggattttgctaacctgacgccctttgtcaaggaagagctgaggtttgccattcagaacaagcacctgtgccaccggatgtcctctgcgctggagtcagtgaccatcaacaacagacccctggagatgtcagtcactaaagccgaggtgggttctgcctcacaatgtccattctttcagcaggcatttatcacacacactccgcaggcaggaggcaggagctggggataagcaccaacaaaagcactgcccttggggagcttaggttctattctctgaagataatggaatagagacaatacaccaacaagcaggcagagtgtacacgtctgaatgaccaggtatagtgtgtgtgtgtgtgtgtgtgtgtgtgatcaagaggctacaacaggaaggtcaagagagcagtgagtttgaggtcactctgagacatatcacgactcttgagagagagaattggtaaacaaacatttggactctctctgtctctctctgtctctgtctctatagggatgactcagcagttaagagcacttgctgtccatactggggacacaggttcaattcccaggatccacatggtggctcacagttgtctgtaactccaatttcagggactccaacatcctcttctggcctctgcaggcaactgtataaacgtgtcatgcatacatgaacacaggcaaatactcatacacgaaaaataaaacataaatattttaaaaaaaggggggggacagaaagaagcaactgcacaaatgtgaacacacatgcagacaaaaactcatacacataacaataaagctaatttttcttttttttaagaaaagaaaggggttcagagaataggtggaggtgagtggtcattttaaatcaggaggccagggaaagtgtcactagtcatggcctttgagctaggacttgagagggagtctataggaagggtactccctaagggaccctccatatacgaagatgaaggtccaggctaggctagtgctgaaatgtagctggcgtctgggtctaacttgaggatatggctgctgtaggtaccggtgtgttacatggacaaacaagagtgtccatttgcttcagggctagggactgtaggagccaggtggggcaagagccgaagttctgtcctcagaaaatgtgaactagaaagtgcaaatgtgagctgggagtccagggccagagacaccgaactgggaatcatcaaattatggttggcgcttgaagctgtgagttcagtgaggccactttctctgtggagactttcttaaaagtggggaatgatatgtcaggacccaaggaccaggagattaggccttcccttcctggcaatggtgctcacagatttcttataccatgtgtttgctctgggctcaacatccactcacacacgtgcactatgtattgggaaaccttcccgtaagacacctggaataatagagttggttattgaaccgtggttgtcagtgacaatgctgcttcaagaacgtcagagataacgaactcttgcaactttgttagcctttcttggttggggatattgcaagcttacttaatgtgtgtgactgcagccctggagcaaagggtgaaactgatcaaaaactgtgagtttaaaaggaggctgaggtccccggtcgtagcccagcgatgagtgtaagaccttgggttttgggtttgatccattataccagaggtagaaggagatggcttgacggtcttcatggttgtttgatgtctcccgccaaggactggcacttgtggaaagtctgaggggagcctggctgatagcatccagtgagtggggacagacattatttctgatgctgttgccatggatgccattgggggtgttaactgtgctcccagctaactcaggggaggtcagagagggtgccacaaaacagtccaggtatcatgtccagtactgggtagtgcaggttagagcctgggacattctgggagactttgtttttctaatgacatagtttgcaataacacgatacagtagttggaaaaagtgggggaggggggctagacagacggatggactggggagggcagttggagagtatctggaggaagaccagtggtagagccgctaatggatggatgatcccaggttccctactctaggggaagggacatatttataaaacagtctttttccagttctgacttacagaaaccaatttaattatcaaaatgttacttcaaaatccaaattatttttaaagtcgtctcaactttaatttaccatattgccagtgtaatccttcttcactggctctttgatttttgtgattcattcttttaaatttttatttttattttacgtgtgtgttttatgtgcaagaatgtatgttcattgtatgcatgcttggtgcccacggaggccagaagaggatttttgggtcccttggaaccagagttacagttgtgcgccatcatgtgggtgctgggaatcaaccccaaattctctgaaagagcagcaagcgctcgtaaccactgagccatctctctgctcacccacagtgtgtgtgtgtatgtatgtgtgtatgtggggtgtatgtgtatgtatgtatgtggtgtgtgtgtatgtatgtgtgtgtgtatatgtgtgtgtgtatgtatgtatgcatgtggaggggtgtgtatgtgtgtgtatgtatgtatgtatgtgagtgtgtgtgtgtatgtgtgtatgtatgtgggggtatgtgtatgtatgtatgtatgtatgtatgtatgtatgtatgtatgtgagtgtgtgtgtgtgtgtatgtgtgtatgtatgtggggtgtatgtgtgtatgtatgtatgtgagtgtgtgtgtgtgtctgcatgcatgtggttcttatatttactaggtctgtggccagataggaatgcctcctccagtgttctcagtgttctcccgtgagttttgcttctctagatttggagacctccatctcaaccgtcagtcagtgtcttctgacccagcagactagggaagggtcaggagtggcctcctgaagctgacgaggtctgacactggccagcccaccatgctggactgtggtcttcagcagagttgagtagctacatgtggccattgctcaaaggtccacagactaagtcgggtctgggtggatgtccatggaggaccacactccccagacctggacagggccctgttctctgagagccccagcattgactcagaacgaggaacaggaagtcagtgtgacttgttggctgaatcaacaggtggtttggtgctctactccccactggtatccagctgtgggcttactaataccatcttagtgccagtaatagtctggagtcttctctaggagctcacaggcttcacagaagggtgtgccttgatgcacctggtaaggacagagatgttaggagtgctgctgtccctgcagctgtgatccagtggttgacagatgccatttggagaatcagtttaagattaaaattcttatttcaaactccaaatgcattttaaagtgggttagattttaatttactagtttcaaatgtaattctattttgatgaatagaattttgactttagattttgttatttattctcaagagtgtgcgcacacacgtgtgtgttgggagttcacacaaaaatctaggccatgatgctggagaaaaggctcgggggctaagcgcacttgctgctcttccaggagactgggggtcccagcaccccattctagcagctacactggttcacagcagcctgtaactccagctccagggatccaacactctcttctggcctctgagtgcatgtgctagatccacacacagacaaataaacatacacataaaagtgactaaaaacaaaaaacaccaaaccaaaaaacccacagccttgctattttggcctcatggtggcttaagtgtggccttttgggttttataggtggcacctgaggaagatgaaaggaaaaggagacggcgggaaagaaataagattgcagctgcgaagtgtcgaaacaagaagaaagagaagacggagtgcctacagaaagtgagtgctggccgagcttcccctactcagcgcccactcctgacctcatcagccttgtgccactggcagaggggagttgtgggtggtgtagaaatgccagctgtaggcagagggaggaggggactctgatatatagaataaagatttgtagatttaaaaacttcagtattgccaggtgttggtggcacacgcctttagtcccagcactcgggaggcagaggcaggcctggtctacagagttccaggacaacctccaaagcaatacagagaaaccctgtctcaaaaaacaaaaacagcaaacaaacaaaaaaaccttcatgtatccaggggctagcaagcttgccgtgcaagcctggcaacctgggttcgatgcccagaacccactgtgggaggagaggacggatctccaagaattgtcctctgacctccacatgcatgatgtggcacaaactggtccatacaccgccatgagtttctaggctttcaggctaaaaagactttattcacaccagttttacaaataaaacaacaaacccctgctaactgccactgactctcaagaaaagcttttattcctctccagcttgctctgttaacccggaagtacttacactgtgctcctgcctgggtttgaaccctgcgtctcttcttcctgcctatccagcactttgagagcacgctatcaggctgtcaccccacaaaaacaaaacaaaacaaaacaaaacacacagagcctggaagtctttgcaggggccgtgtctgctcccccaagtctgtgcaggccagcttctggcagagacacaagctggcctcagtagtcctgggatctctgcttgttgctttagggtcagtgaaaaacctgagagtcttggtgagatcagaaattcagagaaaacgctacaccaccagtttgaaattctcctcagctccccagaccctgtggggctcagatgcccttggcagtggactggagcagccttccctgagcccttggtgctacagcagcttcagtaagcatggcagcctggctcagtggtatccccaaacttctcacatgtcccctaatttcagagacctctgcagggtccacaccacccctgacctagttctgacctcctatcttttgtggtgcatggttcccccagcacacctctcccagctcaatgagccccaagatttccaggtggtctcgcatacctccccaaccctggctccccccataatgcctctatcttttgattgtccctcaggagtcagagaagctagagagtgtgaacgctgagctgaaggcccaaatagaggagttgaagaatgagaaacagcacttgatatacatgctcaacctgcaccgacccacgtgtatcgtgcgggctcagaatgggcggactccggaagatgagaggaacctctttatccagcaaataaaagaaggaacattgcagagctaagcggcaggggcatgggggcaactggggagtccttattgaatcctccttttccaccccaaaccctgaagccgttggaaagctggcttcctgtgcacttctagcatctcagcagccgagagccgttggggcaggggggcctgcggcgaccactgcgttgtcccactctgccctggagtgaactgtggcgcagggcaagagcgtcccttgtctcactaactccaggatttaggccttaccatcctgaccattctcagatgatctagctggtccccggctggggtcccatgcaaagcaggacacccactaatgggattcacgcagaagtgtccgcctcggtaggtggggtgggaccagggccgccactgcagctgacaccatcccttctagggaatacggagcaagaacactcgttgtcgaggttgtccaatggccagggtgtgcttctagaaaataagctgtttcatcccagatggctgtgcacagggcattcacttcagaaccaggtgttgtgttgtgctatttggatgtttgtcttgcacgacactgtaatgatttttctgggagtttcatcagaactgatttctgagagtttgggagtctgccatcatggatagtatcccttaaaagcattcgggtggacatgtgagcttgcctgccccccaggaacgaaatgggcctgctggccagctgtgtcgctctgtgctgtcagaggacgcctcctttccctgtacccactgctgaggaagaacctgggcatgacagcagctccttggctgcaaaccgttgcaatctcacagaaagaaggcacaaaggaagtccagcttccaaagggtaggactctccttcccactcagtgacagagcaggtgtgatttctaggctagaagggccagagatactccattatcccttcgtcacagccagaaaccacagcctgtggagaagtgtgtttgaagtcgtgtgcagggccaggtgtctgcgttgtgggatgttaatggcattgtttttgttattgagatatggcccagagcttttcagttgggaggcacctccctctggccaccaggactctggctactgttaaaattctgacgtttctgtgaaatcctcagagtgtttaatcttactcaatagtatcattacaattttctgtgagagaaaatattacttatttatcccagtattcctagactgtcgacataataaatatcaaaataagacatggtaaacgtacgtgtcatgctggtttctactaagtcttctgttgaaataatgactctgcctctctgttatggggtgattagcatgagtatttggggacagatttcctttgttcacaggaagaacactaggtagggtggttggggtatgggtatgttttatgtctatgggtgttttgtctgcatgtgtgtctgcgctccacattcatgcagtgcctgaggaggccaggagagggtgttgcagagggttgtgagccgccatgtaggtgctgggaatagaacccagatcctttccaagaacactgaatgctgttaactgctgatccgtctctccacttcagtttatttttaagtgtgtgtatgcatgtatgctgtgtgggagaggtgtgtgcattcgtgcatttgcctgtagagacctagcccaggtgggtgacttctgacccttgcctcagtctgctgcttgatgctcagtttctcctcaacaaaccctgaaacactacatgtgcccttcacaccaactgtttggcactaatatggtttgttgttttttgagagcctcactatgtggcccaaggtagcctggaacttactatgcagccctatgtggcctggaagagcctcccttcctctccaggttcctctgcctcttgtgttgtcctgggatctgtcccaacacctgcttcagagtaaaggtttgaaaggttctggctcaggacctgacctgagtcatccttaaacattctgtgaagaggcaagctttccacactgagggttcgtttgtcctcctgggtggttgtgactctaaactccagaagcctctggtctcataaagcattgctcttagggtcaagctaggtggtacctgcctggtgggtctctggtcaaggctagcatagtctacacagtgaggtccaggccagccagggctacatggtgagatcttgtctcgaaactttcgaagaaattcaccctgagctgcaaagcatgggtgaacatggatgataatcacagctagtattcactgactaggacaacgggctagacgtttcctgcatcatgccatgtgttagctacctgtctgtcactataacagaattcctgaggagaaacaaatggagaaacgtgggctggtgagatggctcagtgagtgaaggctcttgctgccaagtctgatgacctgagtccagtcccacacgatggggagactgaactcctacaagttatcctctgaccacatgttactatggtgtgcacatgcccccaacccacccgccccaaccacacacaccacacacacacacacacacacacacacacacacacacactgaatataataaagcattttttaaagagaaaaacagcttagtggttcaagttcttgccacacgattgtaaagacctgtgttcagaacccacgtaaaagccaggtggacatggtggcttgctggtaattctacattgaaaagacagagacgggccatccccagagcaggcagactagccagagcagccgtgtctccagatctgggtgcatctgagaaaaccaaccttgggctgccacacgtgcatttaccactcacacatgcacgaaacactgagaaaaaaagtgcttgggtccacggtttagaagtgtgagtccatgactgattcatctttttccttgggtctgtgtggatgcagcaaacccaggtaggaagtgtatggtggaccaaaatcacctcatgaccagaagggtctgtcatctcccttaaggcacatcgtccatggcacaggacctcctatagggccccaccccccgacagctcagggactcctcgtgcctttagcacaggggctttggagacattcccagtcctcaaaagcactgctctgctccacatgtgaggaagtagggaaagccaaaactgctcaaagtcccccaatttacctaagactgaaggctacactttctaaaaccaccaaggtttcaagcaagagttctaagggtgtatgtgttatgtatataaatggaaaaacacaaatcataatattcagcatccaaatgcgttgagttcatgtgtagccaccactgactgacatccatggagcagtcactccccaggtcccaccctcagcacttggcaaactactcaactgttcatttcttcaggctagcctgtcctgtggccttgtgtcaagcttctttcacgtagcaaagtaccaaggtccacccatgctgaggtacgaatcaacattccattcctgttcacggctgagttacagtgtattgtacgaggatctgtattttgctcatccatttatcagttaatagccaggtgtgtgtgctttcacagagcggtagataacctttgcccttaagggatgaatgtctggagtaagggtccaagtgacaacagtttggaaatcctgagtctggctagctaggtaggtgtggcaatagcccgagtcatggtgaccgatgtaaacagatttccaatgctctccccaacagcagggctgttagaatgtgtgtgtgggggggggtagggaggggcttggatgctctcttggaattcaaggacttctgtttcctacccttcacccctacactgtgcatctcactgagcatactgtagagaagtggatccgtaagagattaaatggtcccccacaaaaacaaaacggaaggggaaaccactgggtaatttacccctacctcagcctacccgctgtctaaaagagtggtcctccagcgcgcacacacacacacacacacacacacacacacacacacacacacacacacacagacagagagacagagagacagagagacagagagagaccatacaacgtcccatgatgcagtaaaaataaatcagtttgaaaacatttgactggcccaagcttccctcgggaggcaaagtcctatagtgatttaaaacaggtttcggaatcagcaagacctgcattcaaacagtaccgtttgtgggagcaggcgactggcgttcagaacggtagtgatagcacaccttggtgggtcttccaggaatgtgtgacatgtcatacatagtacagtgccagtaagcattaattctgccttacttagtaaaggcaagagctgccacgaaagattatcaccaccaacatttagtgaggtttcgtggaaggatcaagcccggtattcaggttgtccaataaaacgacagcataagctccgacctttcaaatctgcctgtccctcggattcccacgggctttgaatcttttcaatttgggctaaagaaaaaagtacttgtatacagtttccccatttgaaaccttttccctttggcacccacctacagccctgtcctcttgcagggcagctggaggatgggacaaagggggatatgacagtgacaggtcacaaagggagagggggataagtatggctgtgcagggcttcaggccctagtggtcacttctcccactagggctgctgttgtagatgtacagggggctttcaaaaaaatcactggtggaggtcggagggttttcacaccctgaagaaaacctccctggagtctaaccctgcatctctacacccttggagagattgggcttggagtccaggtacccaacagcaccccttgtcaatcatctgtgctcccacccccagcccaggcctctgagaggctctgaggcaaactgggggtctgtggggtggggttgagagacctgctgtaagtgtcgccgcctctgtgacccaggagcacggctgctcccctcatctgtggagaccaagaaagacgtgggaacccaccttgccagcgtacctttcttgacacaaaatgaccatgacgtctgactctctgttaccgtattacacagcccagagtggctccggagtcggcatgttcaacaccgccatggggaaactacaacggcaactgtacaaaggagagtatgacatattcaagtatgctccaatatttgagagtgacttcatccagatcaccaaacggggagaagtgatcgatgtgcacaaccgtgtccgcatggtgaccgtgggcattgcgtgcaccagccccatccttcctctccctgacgtcatgctcctggcccggccagcccccggctgtgaagactttccgggacgcagccagaccaccaagggcaaaagccgcaaggctgcgaagaccttggagctcactaggctccttcctttgaagtttgtaaggatctctgttcacaaccgtgagaaacagcaactgcgcctcaagttcgctaccggccgttcttgctacctgcagttgtgcccccctcttgagggccgggatgacctctttgcctactgggaaaaattgatctacctcctgagaccacctgtggacagtaacagcagtacctacgccatcccagcagaggacatggtgtgcatgcctctgctggaggaagacgacaagacaagtatagcagcagccgagttccaaggaaaaggggacccagaccaggtcagtgtcagaagcctccccgtggtcacagacgtgagtgggatcagctcggctgcttttgctggtggtgagggaatccatcatgactctcataaacccacctctttgcccagtgtatctacccccaaagcaaacccaaaagaccttgccaaagagccatcaacagagacaacagcagcgtcagtgggtagcctagtgggcgctttgagcttggcaggacccaggtctgtgagttctggacagacaaatgcagacatagcagggggcgctgccatgggtgcaagaggaagcaaaagccatttggccattgcaagcactggcaagatgtccccgaaaagcgtgaaggctgccttggtagggacagccagcaagtctctggagtatatttccagtgcatcctccagcgtctcccgaaaagatagcatgactatggcaattgtaagactagaacctactagcaagtctgttgaagaaacagcaactgatccagccttgaccttgccgagtgaaagccacacaacagaacagacaagacagccgaaagcccccgaggccaacacggaagccaataaggaaaggcgggaaagaagggagcggagggcaaaagacagggctggcagcagcaggagttcccgccagcagaggacaggagaaagtcgccgcaaggcagctggggaaaaggtggttcgaaaatcaaccagccgcagatctgctcgggccgacaagaaggaaaaaggcacccttagaggcagcaagcgcaacaggtctcacaaaggggtcagccatgtccccatcacgaaggagtcccggagctcccacaaatcagccaggaccctctccaccgccagctctgcgtctacgagcaagagggttggcagaatcagcttgttcctgaggaacatcagagccaacctggctgcaaaaggcctggcatcacagcgtggccaagacacggacatcgtggccaagacactggagacaaccaacgtggaggccatcatggagacagagagtggccagggcctggacatcattggttctgtgacatccgaggtcatggagacagtgatctttgaggctccttaaagtacaactcagggcccaaaactgcaaagggcccagggcccagggtgaacccctagagtcgattccagctttcttactgcagtttgaataaagaaccattctacctgacaagggctctccatatttccatacccagaagttcaggagtgacctcatagtgaattctgtgatgtcatcgcgagacccctggctgcacctggatgaggactccctctcctggaggtggggccccacagctatggctgtgttctctgtctattgataagggccctggctctagtcagggatgggagagggcattagattggttgttaagactgtctggacttaacaattcagcatgtatctgtctatccgagaataagacgcatttctgtcaggtgtgtatgtttcaagagacagctgtgagaatattcctagcaaagtgctttaatgttccaacactggaaacagaccaaataacaaaatgagaatttatactatatagtgggtactatccaagtaatacaacataggtgaattttgctcataatgttgaaaaggagaaaatcaaggaacagatatcattgcatttataggatggctcaaaagcgacgagttgaagggaacccagacatgaacaagatggactcaagaccttcagggatgttaagaggctgtctgtctgtctgtatgtctgtctgtctgtctgtgtgtacccatgccatagtcggcatgtcaaggaaagaggacaacttttggagactggttttctccttccgctatgggaattctggggaacgaaacccaggccatcaaacttagtggcaagtatctgtgtacaggctgtatttaaagagtgagtacattgaggattgactttacaattttagtgcctcaaatgtctgcattgtgataatatttccagaaacatatcttgaatctttccccttatgtagcaatcttaagattcaagaagtcatgagtagttattagaaaaagaaggctgagggagatggttacttcattgtcctgtgggacttttcaccccaacctacttccttgttcagagtcctgtttgaggaacaagagaggaggttcagtctgggctggccaccaggccctgtcaggaagctagagggatgggcactgtctgttgattaagaggagtagaaccggttgtggggtctgggaagaccaggtgtagctgggaacttcgagttggtttttgaactatagtagacgcctagctgctggctggccctatctaagaagggtccagaccaccctttaggctgcccctgcctgcactgtagctaggaacagacctccccctggagttgcaaacctttcttcccatctccccagccaccaatgaaacgcttggaaggctaagcagaattttctccatatccaatctccaaaactttctaaactccaggaaacgaattctcagagctctctaggcgaggctgcgggccaccagggtcaaattctcgaatctgcctttgaggccagctggctttaagtataggtagtgtgtggtgggcatgggggttgaggacttgcttctgagaaccggaagctggctcaagacctgcccacaccaaccatttcctgcctccagacaaggctcttgaccctggtgtgggggactagtggggtgagtcaagttattaagaaaggagggagattagagaggaccaggcttcgaggaaaacaagctcagaatcattaacctggagctccaaggaggctgggggaggggctccccatcctgctggagcccaattaatggtttacctttctgtcctttgacagaaaggtgtggagtttacaaagatcacaccacatctctttaatttgagggtttccacgcaggtgagtgggagtctgtcagaccaaaaagaaaagaaaagaaaacaacaaaaagacactacaaacatttacatggcactcaactaaaatgctccctagtgggcctgctctctcccgtcctcacagacccctgcctggcaggtcagccaatgagcattgagaatatcactttagagtacccgttctaggtaccctgggggcatggcagtgcgacacccttcaaaccctggaaggtgttacagcttgcctgagagatgtgtctttgggggataacatctgtttgtaggagggtacctgaagtcagtttcggtctgggactctgccaggtaaggcacggggcaggggagggagcgggaagacctatgaagtaggcaggcttgaaacactgcataaactgaggctggagggccaggggagagacaggcactggtggcctgagtgtctgcgccagcctgccggccttcgggaatcacttgaagggcagtgcccgatgggagttaagatccctgtggctccaggatacagagttgaggaaagggggccatctggaggccctggattctttaggaagcctggctagaatgaggagcccatgaactaggaagccatggaaagagacaggcagtgtcaggaggcatagaagagacgaaaaaggacagttgtccgtctgtctcagaagacaggaagccaaggtttggaactccactgcaatcctctcgtcagcacagtgaaaagaatgggggtgtttccctcccttagggggcctgtcagtctgtggaatgttagtgtgtaaaacagcttagaggttaaaaagcaaaaacaaaaaaccccatgcagggtgttaaaagtagtgtggagggggagggcaagagaggagggggaggggactctggaatctagtgcttcaaagagaccagtgagacctctgaacgtgatgtcaatgaggaggcctctgcactccagggagcccctggtagctgatcagtatttttccctggtgtaagaaggggctttgggagtccatcccacgtgaagggatgctctctcagcctggacacatggggagggcccaggcccagcccaggaagatgtggtggactttgcagagcccccatgagggccctaccctgcctggggagtggagggtggctgggggggggtaggtcgggggtgggggaggagggatgggggcgaggggagggagagggaggagggattgacatgtgacacaagcttgttcctaatttgaactaatagagagagagagggagaggacagtgagggacaggagctggtgagatagatgctcctgcaacctccaggggtgtggagttgctccacagagccccttgtggtcacacgctgttactgccccggtcaccgctgcctttgccacagcgctggcatcagccggccctcgggtgccacccctgcggcagcggcagaggcgaccctgaccctgcggagctgcgagaggacgcgaggcagctgcggggctcgggtcccgacaggagcgcgacagacgtttccctgaagagacggagtttaagtcagcagaagaggtgcagccggttagtgtcgcattccctctgcagcccgcgagcgtctgagacacggttacggaaaaccagtgataagcacgacgggaagatggccagacacacacagatacacacacatatatatacacacacagatgacacacacacacacatatatacacacacacagatacacacacacacacacacacacagatacacacacatatatatacacacacagatgatacacacacacacacacacagagatacacacacacacagatacacacacatatatatacacacacacatatatacacacacacagatgatacacacacagatacacacacatatatatatacacacagatgatacacacacacacatacacacacacacacagatacacacacacagatacacacacatatatatacacacacatatatatacacacacagatgatacacacacacacacacacagagatacacacacacacagatacacacacatatatatacacacagatgatacacacacacacacacacagaaatacacacacagagacacagatacacacacatatatatacacacacagatgatacacacacacacacacagacacacagatacacacacacacagatacacacacataaatacagataaacacacacagacacacggacacacatacacacacacacagatacacacatatatatacacacacagatgatacacacacacacacacagatacacacagagacacacagatacacacacataaatacagataaacacacacacagacacacagacacacatacacacacacagatacacacacatatatgtacacacacagatgatacacacacacagatacacacacagagacacacagatacacacacatatatacacacacagatgatacacacacacacacagacacacagatacacacacacacatatatatacacacagagagatgatacacacacagacacagatatacacacatatatatacacacacagatgatacacacacacacacagatacacacagatacacagagatacacacacacacatgcacacacagatacacagacacagatacacacagaaacacagagatatacacacacacatgcacacacagatacacagacacagatacacacacacacagagatacacaaacagacacagatacacacacagatacacacactcacacacacacagagattaaacacacacacagataaacacacacagatacatacagacacagaaaaacacacacagatacacacacataaatacagataaacacacacagagacacacggacacacatacacaaacacacagatacacacacacaaacacacaaagataaacacacatagtaaacacacagagatacacacctacactcacacacccccacagatacacacacagataaatacacagagatacacacacagatacatacacagagagagagagatacacacacacaccacacacacagatacacacacacagataaacacacagagatacacacagatacacacacacagataaacacacagacacacacacagatacatacacacacacacagagataaacacacacacctcacacacagatacacacacacagataccacacacagatacacacacacagatacacacacacagataccacacacagatacacacagagatacatacacacacagagaaagataaacacacacacagataaacacacagatacacacagatacatacacacacagagagagataaacacacacacacacctcacacacagatacacacacagagatacacacacacacaccacacagagatacacacacacaaacacagacacacaaaggtgatgttcttcatttgagggcagctaaagtacaaggtctgtcggtgctggctgccaggtgtctgtgccccgtgtaccattccagggctgcagcactctctgcagaaccacctctgtgggcagatagacagacagacagacagacagacagacagacagacagacagacagatgccctgcacccattctttttcctgctgccaccacaatcacggaacactgacaaccgtatttaacaatggttcaggaagaaacaacctgtgagccctggggtcacaggcgtgtgccaacgtggctggtttatgctgtgctgggttgaacccagggctttgtgtgtgaccatcaactaagccatataactcagcctcataaaactaaatgtgtgctgtgtatgtgtgtgtgtgtgtgtgtgtgcacacacatgtacatgcatacagatgactctggaagtcacagtgcatcagatgcccctgaacaagagtcagaactggttgtgagctactcaacatgggtactgagaactgaattggggtcacaccagacatggcatagcttacatacccaataccatgaccaaagaagagggtagtttcgtcgtaattccttagtgggttaaattcagtgtcttcattccaggaatgaaggggtggctcagggcacaacaacgctggctgctctttcagaggacccaggtttgattcccagctcccatgtggcagctcacaaccatctgtaagtccagttccagaggacccaatgccctctgcaggaaatgtgtgcacatccaggcaaaacgcccatacacataaaaaataaaaacaagtcaattctcctttagaaaagttcgcctccatctggatgcagcgttcatgtttatgactccagtacttaggaggctgaagcagatggggaaaaaaagatgacttccagattaattttgaaatatagtgtacttttatttgttttttgaggcagggtttctctacatagccttgtctgtcttggagtccacatggcagaggagagaactaactctggcaggctgtccctctgacctccacacatgaactggggtgtgacccctccctcaagtaaagaaggaaggaaggaaggaaggaaggaagaaagaaggggaagaagaagaggaggaggaggagaaaagaagaaagaaagaaaaaagaaagaaagaaagaaaatctcaggaagtaaacaaaattcatgggctcaagaagcaaacttctgagtacctaaagaatctcgatatcggcaaggcctttaaccagggttatagatgcagagcggggaagtggagactcagaccacaccagctgcctgcaagctgtgcagggatgaagtagtgctggggggagggtgtgcgttatggggggtgctcagagctgttgcccaggttggagtgggctgtgcggggctgcagctgccttgttgccttgtaagtcaccccagtgaactcacttgttccctgagctgggcttggcctgtcctcagggccccatctggagggagtagtggtctgtgtacatctgcccagaaagagtcacaacactgaccaagcttcatcacctggaacaactcctcacaccacattttgtgggctataccgtgtctaagcacacgaagccaccatgtgaacagcctggctcatggggagagagagatcaactatacctctttgtagagaaatggacatagcacgtgggaagagagcactgatggctgtatgattgccactccggaaaacaccattgcctcattccaggtaccaatcctctcactgacacagtagctctggcctggatgaagctgagggccccgaggtaactgtatgtcttgaacactccttctcttttgctcgttgaccttgtcacttctctcacttttcccacctctgcacacttcccccaacgcatccccacccacctccttccatgtcttcaaactttggttctgagaaagttgagagatcaacagggcaccaagaccgcagcacgtcagtcttggaaggggcctgacgaagcccaggtgtgcctaaccaggagggagctgtagacagggactttgctgaggccctcctttagcaagtactggagttctggcaaacacagaaaagcacagtgggagcggaactccaacaaggtccacagtttgctttccagtttgactgcctagaaccccaaccacctgtttctgttttgaatcctctacctcacccattgtaggatccttagcttcttggaacctgtcccaagccaactccagagactgacaggattacgggtggagcaatcgatgaacagctcaaaacccagtccagctacctcactgctgataggacttagatatttgacatcaattagcagcccacaaagccagttctgaaaccttcaggtgtctgcatttggctgatgaagtctagttgacgataaatctaaaacaatgtagctaacaaacctgattgcatggctgagcctgagacagcatctaacacttctaaactggatgaacctagatccttccataggaatcccaagatggaccacctgaggtctcagagcattgagcagttggatctttttagacagggtttctctgtgtagcccaggctgtcctggaacttgctctgtagattaggctagacctgaactcatagagatccgcctgcctctgcctcccgagtgttgggactaaatgcggagccaccacatctggctacctacgtatttttgagattgagtgttgttatgtagacctggcagtcctggaactcactgagatccacttggctgtgtctctggagtctggaattaaaggcataggccaccacacctggctcaagtggttggatcttaagagaaatggccagggtgcaatgcagacagggttaggacgctgcataggtgtagggagagaccttatgcaccagtgctgctgaccatgcctgtgtgggcgtggccacaggtgtgtaaggtgcacatgggataaagatctggggaggccctcgcacccggttccagtcggatctcagagagctgctgagactggagcaccaatctgggtcatcggttcctctgtaagttatttttcccttaataaattaaccatctatgtccatattccatgcacggttacctttcctaaacatataggtatctaggtagttaagcagtggagaaggacctgataagaagcctctcagtgtttttctcacctccttgggtgcagctctgtaacctagtaacaaacactgaagagcagtagccattgttaactggtgtgctcattactttcctgttgctgtgataaaatagcacgagtgaatatgacttttggagtttactttgacttacagttccagtgaacacatacctcactgttagtcatgctgtttcctcctgataaagttggtaccagagagtcggtgctgtttacttagtactgaggggtcatggactgtggtttcagagagccacagaggccaggaagtgtgaccgggaaaagtctctgcatgaagccccaagaggggaggaggccctgacagtcctttgcatgaaacagtgatggtgaatggtggattgtttggagacctcaagatgttggggatgccggagtcataggaaatctgcctagaagacctgcacaaagggagtggaaccatcccgagagacagacagacagacagacagacagacagacagacggagggagagggggagagagagacagagacagacagacagacagacagacacacacacacacacagagagacagagagagagagacagagagagatagagagagagagagagagagagagagagagagagagagagaaagagagagagagagagagaggttacaggcagcagtgcaatgatggaatgacatggagatagggattaggaattttccctgctgggttccagtcttgctttgatccagtatttcctcattattccccagttctgtccctttggaatgtcaatgcatattctgtgccttcgcatgttggaagtatggactttgctttttggttttgggggaggggtcacaactaagagtttgcactgagtctcaagagagactttggagttttagacttcctcgagaatgttcacaactatggggatttttggagttggagtaaggtattttgtgttatggtgtgaccatgagtatccggagaccgggaagtgaaatgtggtttgagtgacaaatgtccccagtctcagacagtcgaacacttgttccccagttggtggtgctgtttgggaaggtttaggaggtgtggtcactggatcaagtgtgtcaccgggggctagtttgagttgtttgcgtcctgtcttaatggagcatccctgcagagtggggtattctacctccctgagagcggcctgttgtttcattttgtcctaaaatgtcccgttgttttactttccctttgcattctgtgtctaaagaagtttctctgcaaaatgggaggttttaacctctgagaaaacggctacagaacatgtgttctgccaccgccttgaacttgctttgtatcaaaccatacccttgaacttctcatcctgcccccagctccccactttatgaggtcctgggggttgaatccagagctttgtggatttgcactaggcaagcactccagtaagagccatctccaccctcccgagtgttactttgaaagacatccagtcatcactagcagagggtcaaggccccagcaaaaaccaagccaaacgatcaaaaagcaacctaatgcctgctcagcagaagaagacaggaatggctgctgggcaatcagcagactagacttcactttgatcttggactccctaaaaagctcctcacactgcagcagctggcagtggctggcccaccagcccaccactgtgtccccaactcttgttccttcctagctctccagggtttctcattttccttcccctccctgtcagacagcctctcttcctccttccacatcggcttccacccccagtttccctttcttccacacacttgaccccagttttccctttttttgcttcttccaatcctctactcaaatctgaaggtggctcttcattccaactcccacctcactaaactcaacggctgtgcccatcacgtgactctgatccttccccgatgctccaccaagtcagttgtaaagctttagatctgactgccttcccaacgggtgcaggaaggggatcggtaggtcactgataatgagatctcttgttggcgtgggaaggccatggccaccttcatctgcctcttctcgggacatggattccttggcttacttagacatggaggctaaattgggggttatgctaatttacacaaagtggacgcaaatcaatgtgaccctggatttgctggaaatcagcagctcctctgccaggaagacttagggaaatgttggaatccacttcccaagagatatataaaaatagagtagcttccggctaggggtgaggggtgtggctggaagtcattggagaaaggtgcagagcatagcttccgtgttgggctccaagccacccaaccccagaggaagtaaaagtatcaaagccaccaaacctcccgacgtctttcttacctgtgaattatgagtcagttccagtcctgtcaagaaccattgaccccagagagcagagcagagcacacacacacacacacacacacacacacacacacacaccacacacacatacacacatacacacaacacacaacacacaacacacacacacacacaccacacacaccacacgtacacacacccacacacacaccacacacacacacccacacaccacacacaccacacacacacaccacacacacatacacaccacacaaaccacacaccacacacagacataccacacacactacacacaccatacacacacatacacacacaccccacacccccccacacacatacacacacatacacaccacacaaaccacacaccacacacaccatatacacacacaccacacaaaccacacaccacacacacacaccacacacaccacacacaccatacaccacacaccacacacacaccacacaccacacacacataccacacacaccacacacacacaccacacacacacacacacaccacacacacacacacacacacaacacacaccacacacagacataccacacacaccacacacaccatacacacacaccacacaaaccacacaccacacacacacaccacacaaaccacacaacacacacacaacacacacaacacacaccacatacaccacacacacacacataccacacaccacacacacacaccacacataccacatacacacacaccacacacacacacacacacacacaccacacacaccacacacacaccacacacatacatacacacaccacacacaccacacacatacacacacacaccacacaccacacacatacatacacacaccacacacaccacacacatacacacacacacaccacacaaaccacacaccacacacagacataccacacacaccacacacacacctgactcccctgacatctcctacttatatgtagaacccttgtgcatagctggtcgagtgaccagaatgatctggaagcaggccagcaggactaaggtgtctggatgtttctataagaaagaccttagaggatagctgcagagtggataacttaggtgtgaaaaggtcaggcacctcatttcctgaagcagagagaaaagtacatttccagagagggtaaggatggtgaaatgactcccgaagccgcagccggttcttttgggatataacccaagctatggtttggatcctaaatgttcccctcccctgccaggctgatgtgtttgccctcccacccccatgcaagcaaagaaatgctttaaagaggaaagagggaggaaaactggagtggagacgatgagggaacgaaagggacaagaacagggaggaccactcaccatgatgcccacagctagtttgtctctgagaagctgagactgtgaaaccggaggacccccatctgaaggggaaaaggcacagctggggtcctaccatagagacactggggtgggaagctcggcccaggaacctgaggccagcctggcagcacatcgcagttagagagaaaaggggtggagaaggaagagaaagaaggactggctttccattgaccatgtgtcctgtgcctgtcccgggaaaggggacagtgtgcatatggaacccactacagagtccccatgagtcctggcaggctgtgctagaataatgagttcaagaccgacataacatgacctgtctcctcaaagtgtgtgtgtgtgtgtgtgtgtgtgtgtgtgtgtgtgtgtatgtgtgtgtatatatgtgtatttttgtgtatgtgtgtgtatatgtgtgtgtgtatgtgtgtttatatatgtgtgtgtatgtgtttatatatatgtgtgtgtatgtgtgcgtgtgtgtatgtgtttatatatatatgtgtgtgtgtatatgtgtttatatatatgtgtgtatgtgtttatatatatgtgtgtatatgtgtgtgcatgtgtgtgttgcacatctgcatgtgtgtatgtgtatatgtgcatgtgtgtatgtgtgtgcatgtgtgtgtgtgtgtgtgtgtgtgtgtgtgtgtgtgttgcacgtctgcatgtgtatgggtgcatgtgtgttcgggtacaagtgcacatgcaggctcaagagtgaggtcatgaatcatcattgctcttttactttatccagcaaggcaaggtctctcaatcaaacccagagctcaccaacatcactagtctagcactgaagaaagtcagggcaggaactcaaacaggacaggaacccggacgcaggagctgatgcagaggcctgagaagcgctgcttactgcttgctcctcatggcttgctcagcctgctttcttatagaacccaagacaaccagtccaggggtggccctgcccaccctccatgggctacacgcttccacatcaatcactaattaaggaatgcattacagatttgcctacagaaaaatcttagggtgcagggtcttagcccaaccactgaaggctgagctggatccgagaaaagctaagtgcgcgctgttccagggtcccggagacagtcagatccgccaggagtctagtcaagtaggaactcatttactgccccccagcaagctcttttaaaggggaaaccgcaggggggaggggaacagccagccagtggtttgaaaggtcatcctatcactaggcgcaccacgctttccctagtgaacatgggctgtttatgcagtgacctcatctgctttgatctaggcaaccaatcatcttttttttgtaaaaactcaggactcctcgaccatctgacttcccctcagcgccatctgtgactggctcgtgtgccctactttcgggggtcattttttccagttgagagcccaaataactctatcttgtttcaagttgacataaaaactggccaggagagttcctttttccatatgactgtagctgacgtcaagctaacaaaaaactattcagcacagacaccctggacctggagttacaggcggttgtgagctgcccgacatgggtgctgggaaccaaacccaagtcttctggagagccgccaacgccaatgattcgtcttaactgctcagcctgttgccttattaacgtattctttgacgagtttgctcgtgtaaacaatgcatctggatcatatgcaactctccctcactgctccccggggtgtccccgccttgccccttgatagcccctcctcatctttgtggcccaattcctactgcctgtggaaatgctgactgatgctgtggactccatcaagtcagctacctgcagccttggccctgtcacgatgtggaatattaccttaagggcacaaagaagcattgcatttgtttacgcttaaggattttactttaactgtgtaaagtgtgctttcaccttgactgcctgaggcaccttattggtctgataaagagcttaacagtccatagctaggcaggggaagcataggcagggcttgcaggcagaaaaaaaataggagaaatccaggctccagagagaagaaagagaagatgagaacgagggagatgcctggggccagaagccagagagaggacagccagacagacatagaaaagcagtaaaagtaaattaggacggacactgggcccacgtcgcttgtcatacattaccggcctgtgtgaggactctgtgcatgggtggaacctctgcacatgtgtggtcttccctttaaaagttccagcacccacccacccaccctcacaccgcgcctctctctctctctctctctctctctctctctctctctccctctctctctctctctcttctcgggttggctgataatccacccccatctccccctccttttcaataaaactccgcatgggttgttgtcggaagtttcgtatttcatctccaatagctgcagcagaaacctaacatatgcagaagcaggaaaggcactaatccgtgaggcaaagagaaacaggttgatttaacttaaacgagctagccagaaatgagcctaagctaggctgagcattcaaaactaataagtctctgtgtcatgatttgggagctggttgtcggcctaaaagacagagcctggtacaatgccgcgtcctgaagacattccgtagcccacctcagctcttacattcttcccacacctcttccacatgtctccgagccttgggggaaatagatgggttggtatagatgccccatttaagatctgaacatgtaatgtacgtgtgtggtgtgtgtgtgtgtgtgtgtgtgtgtgtggacagtcattcagcaagttctgtgactctagagaactctaactaatagagcactttggccagttttgagcctctgccttgactggggaccactccagatagaagcttctttggcccaggccgagggcagcactaatggatggctaagagcataaatattttaaaaaggcagcttgacaacatggcccattcagcaaaaaataggttcctccctaggtcctgtgacctcctgagcccgggtctttcgactaggttcacagtactagacctgaattcccttctggggagcaggtctcaaactcaatcccaaagtagttggttacttccatggaggaggaggggtccctgcgggtgtcagggcgggcagggcgggcagggaggcagggagggaaagttcagcccaactttatcaggctggatcaaacttctagggagtctggtgccaggtggtttattgcctgtagtgagatattcacacacacacacacacacacactccctgcacgtgtagtgctgaccacgcctgcttgggcgtggtcacaggtgactggtgtgtgtgtgactggtgataaggattaggtttggggctcagacttgctctggctttggtcaggtcacggggagcatcggggtggcagggtcatcgcggcagtcatctgtttcttttgtaagtgcattctccccgaataaacttcacttcacctgtaccgagtctagtgaatcttgattcccacgcaatatctggtgcccagcatatttaaacacagtacaatttggaggaaagtgtcctggtgtaatataaatcccagtgcacaaggagccaaaatcttatcgaaattcaactcaaagtatatgtcatctcttctgggaagatgggttctagagacagaatacctgcattagtttgagagactatggaagcagctggtgtggtctctgtcacacagacagcgtagaggtcattagggccattaggtatctgtggtcctggttgtgggtgcttgggggagcccctggctatgcagataatgtaaggatcatttagattacgagccacctgcagtcttggttgtggaagcttggtatggcctggccccacaggcgttgttaatcacctccaattctcagctttctgggaattgggaagaacaggttttacatcttccattgaaaaaacaatcctgtagcttaacattctcggtttcctaggtgggtacaaggacagctgtgttcccaacatgcctctctataaccttcaagttactcttgtatcagtggtcacatctttcgaggcaaggcggtattgtactgtgtagggttggctgagggatagcgttgataacctttctcagccagtggctggcatagcacccatcacgcatggtactgaagctcctcttgactgtagacgcagtgtagccagctgccttaggctcccactgctgtgacttccccaccgtgatggactgaaacttcaatctgccagtcagggcaaacctctctctcttaagttccctttgctgggatattttgtcacagcaataggcaaagagactaagacatgcccactgaggttccattgatggtgacacacagagtcaacacactcaactgtctgagtgccatcagcactttgattaactccccactgctgtaaccaaatacttaagacttgttttctcaagctttcgcaggtctcaagccatcacactagagcaggcatgacagagcagagtagctcacatcacagaggccacaaaagcggtggggtctggagaaccagggcaagacgcactccccaggcttgttcttccactcacctgctttctttagccagacacttccttctgtagcttgccaccttccaaccatcctctcaaacctgactccatccttgagatctaattgccactggagatgctcacacagacacatctggaagtgtgccttattaatctagacgcctctgtccaatcaagtttgccatcaagattaatcatgacatggggcccctgtccacttcctcagcaccactctggaccactgctcccaggctgtggtttgcaatcccaatccctccccgtggtcactatgaagcaggtggtaataaaacaattcttctttgccttgactctcatttctgtggtcactccagcaccacacacaggttttagagtctgatggccttccccaaaggcatgaggtcaaaggccaactgaaaactttctgtcttcctcttccaaactccctctgagggcgtgtccagtgtggacagtgccacccacccacgtacctaggagagcaggagctctttgatgagacaggaagacatttccagcagtcttccttggacttcagagtccacctcccaggatccacacccacaaccgtgagattccgaagcctctcttcagcacagcctcctcaggcaaccctgctgcctgtgtcttctcatttgacttttgtttttaaatgatactcagattttctggaagccgtaggccgccaacccacagcggccaacgagacactcgaatgtcccacattctccgtaatgctcactaagactccgtggtaggtaaagggacaggaatcacagtcattgctttttgcttttgtcatctggtaatcacgatggttacagagaaatttgactactgccttccccagcaatgctacccagtccacaggctctttaaaaattttaaagatttttatttaattttattttatgtccattgatgttttgtctgcattcatgccaatgtgagggtgttgatcccctggaactggagttacatacagagagttgtgaactgtcatgtgggtgctgggaattgaactcaggacctctggaagagcagccagtgctcttaacctctgagccatctctccagctctaaaaagcattttttattaggtttattctttacttatttatttagtggaggacaggggtggggtgcatgtgggggtcagaggacaactttggaagttgtttctcttctcccaccatataggtcccaggactgaacatggatgtcaggattataagcaccctgacctgctgggccacttctcaggcccctcttttgctgttggcagtactggtgcttgaatatagcactttctctgtgttggataaacaccctgccacagacggatggcctcggccctttacttttgagacatggcttcactgagttgtctagacctcgaacttgttttgttggtgcactgttgatcccctgccttagctgggatgacaggtttatgccatcaggtcctgactcaacacaggctttccccagtcctgcagatgagttcagccgcttggcttatctgtctccagcaaccaaccactgcttcctgttggaggggagtctcccattatgtgagacattagtgggtggcccgttgcagtttaacaaggccaaggcctccttcggtctgacccagctccgagccctagactgagcaagagctacacttgtgccagacttcagttctggaagttctgagcaatgcccagaggcacaagcattcttccggatgaggaagctaagcctggctacaaggtgtttattgaacttcctgtctctttcctgccatttccgccagtcccaccctgctccttcctttctgtgcacccctccctggttatcgccggcatactggatttcttgttctgaaggcattctctgtggcccagagggactgttagtgagccacctgcctatgctcccgtttcttctcttgttaacagagccccagctgtccattgctcaaacattttccctgagcacactgactgctgagtcccatccccaatctcataattgtccaaggttggtgctgtgacccagctgtggcctaagagattggtggagactgctggaagcttctggtaagattttcttcacagactgtgccctgccccctttcctcttgcttcaaggggagcttggagccacagcaggcatcctgttacctaaaggaaaacagtgtagctttgaagaaagttctgaaaactgatggacatgtggacatgcctaggtccccagtggacatgcctgagtcctcagtgaacatgcctgagtcctcagtggacatgcctgagtccccagtggacatgcctgagtcctcagtggacatgtctgagtcctcagtggacatgtctgagtcctcagtggacatgcctgggtcctcagtggacatgcctgagtcctcagtgaacatgcctgggtccccgatggacatgcctgggttcccgatggacatgcctgggtccccaatggacatgcctgggtccccagtagacatgcctgagtcctctgagcaccacacacatccgagactgagtccctccagcctgcagttcctgtgcagatcacccgattgtcttattcttttatactattttatcatttgcagctgaaacaccctgataaactgattccccaaactgcagtgttttctcaaataattaacccactcagtaggttctgcaagagacctgtaggatctcagagatggggggtggcatgcagaggtagaatcagggagaccctgggcctcctgagttctcagccagtctcacctcatagtgggggcaatatgggtgagaagggaagggaaggatgggtagagcctggatcctggtctctcagactgaggacagaagaacagaaagagacagagaagcctcagttaggcttggacaggtctgtggccagtggtgactgagataccaagaccagaagacaggcaaagtgtgtccccagtaccttctgtcagagctgctggtgttctgaccaggtgaatatgcttgcacacacatgctctgccgcctggctccattcccagcccagagataatcttgaacttgtccttctgtctccacctcctaagtgctgagactacagatatgcaccaccatgatccctgtatccatgtaaaccataagtccagggcttcgtcatgctaggcaagcactctgagtcctcagcccccaccttagacttaaaaagaaaaggagacaaggatgctctagttggcattgaatctctaagtagatggatggccttgaacacttgtggaccacatgtggttgctctttacactttttaaagtgtatttttgtgatcctttaaaggggtaaaatagagaggaagcagagagaagatactggaggaacaatggcagtgccaagagacagctgcgggctctctctctccccccctcccttataagccctgctgattaagcatgcactggagagtcagagggctgtgaggacagttaagtcccttccaggaagagaagcagtctgacagaaagggcatggagagggcaccaggtgtgggtctgtactgtgtaggatctaacaccaggtgaaaagtaggttgttttggtaatagccaacaactagtcacatgatccaaaaaccaaatttggtggtccctgtgaagagactgaagagggaggaacttatatcagagacaaatatgatatggtacatgatatggtatgatatgatatgatgacattggcctgagacatgagatgcattatcttggcagagaatggaggtttgagtcatagaggtttctgttgttatctggtgagaagaggagcaccgaggagttacagaagaggagcacggaggagttacagaagaggagcacggaggagttacagaagaggagcacggaggagttacagaagaggagcacggaggagttacagaagaggagcacggagcagttacagaagaggagcacggaggagttacagaagaggagcacggagcagttacagaagaggagcacggaggagttacagaagaggagcacggaggagttacagaagaggagcacggaggagttacagaagaggagtacggaggagttacagaagaggagcacggaggagttacagaagaggagcacggaggagttacagaagaggagcacggaggagttacagaagaggagcacggaggagttacagaagaggagcacggaggagttacagaagaggagcacggaggagttacagaagaggagcacggaggagttacagaggaggagcacggaggagttacagaggaggagcacggaggagttacagaagaggagcacggaggagttacagaagaggagcacggaggagttacagaagaggagcacggaggagttacagaagaggagcacggaggagttacagaagaggagcacggaggagttacagaagaggagcacggaggagttacagaagaggagcacggaggagttacagaagaggagcaccgaggagttacagaagaggagcacggaggagttacagaagaggagcacggaggagttacagaagaggagcatggaggagttacagaggaggagcacagagaagctgcagaagtagagcaggaaaggggcatagagggcagaggaacagagaagccaagagcacagccccagaagcctttgtcgtctttccatccttacctgtatccaccaacccctgactgaccctgaacttctctactcttcaaatctaacaaaaaaaaacaaacccagggcctgtgagatgactcagcagcaaaaggctcatgccaccaagcgtgacaacctgagttcaaaccccatgtggcacatggctgaaggggagaaccaattcccatgtagtgtcctttgacctccacagggtgccatggcatgctggcacatgctcacacagagatacagaaaagaaactccaggtgggtgtggtgccttgcctctttaggttaactctggctggccccttctgatacctctggctgccacctcctcctccatctacacccctgcaggagctactcaggcttacaaacatccataatttcagtttcagggatgaaagttttcttctgaccttctcagcaccagggaggcacatggtacacagacatacgtaggcagaacactcacgcacataaaataaaataaataaacccaaatcggaaattactctcaaacatgtatgcaatatactttgatcacatttacccttcgtggtcctcccttttgagacgggttcatgtagttctcgatggtctactatgtagaccacgctgatcttgaactcacagagatccacttgtctgggcctccctatgctggggttaaaagtattcacaaggtcagcctctttgtcctcatgctcactcctgtgcctgctgtactcatttttgttttgttttgattttggggggacagggtttctctgtgtagctttggagaccaggatggcctccaactcacggagatccatctgcctcagcctcccgagtgctgttattaaagtcatatgccaccacagcctagcttttgttttgtttttttttaaagatttttttaattacttttttgtattttatgtatatgagtgtttgcccgaatgcctgtctgtgtacacgtgcatgtacgtgcctgcagaggccagaaggcggcactggacccccagagactagagttacagagggttgggagccatcatgtggatgctgagacttgaacctgggtcctacctgcagagaccagccagtgctcttaaccagtccctggtttgtgttttttgaaattgggactcactgtgtacatgggcaggtctgggttccgaatgatcatcctgcctcagcctctggagtgttgagatcacacaacacccaggaacagccagatatttagacatggcaaatagttagctctgctactgtctcgctgttaaatggaaactaagaaagcgtctttgcttctttgcaaaagtcccagggcctcggtcacctgcggagcacagagttccagcagcttgggacctgaggtaattagtgactgatgatgtcaccaaagacgttgcattcctaagaccggaattttttctagactgggcttcgcactaagcctgccacagggccttactgtgacacccttcatggatgagcatcctgaggcctaggcaggtcagaggccgcgactgacagacgggtctgggttctggcttgcagctctgtacctgtgcgaggcgggagggcgtggggaagcggagggcccaaagacaacccacgtggcggggggctggagtcccgcagccaagccacacagcgtctgcgcccctggctgggcccggcgtgcccgccagtggccaccaggtggcgctgcgatgccggcgactcccgggtgcagtccgcgcttctttggcggacccaaaccctccaacctcgaggacccggtagctggaggtggaccgggcgggggcctagcgagcggtgggaggccgctgtcccattcccggcggacgcggtcccttggccccgaccggctcagacctcagccgaagccgtggcctggcgctcgcccggtgggctgcgcccctggtagacctccttcctctttcccagccgcagcctccccgtgtgagctcgctcgctcgctcgcatctctgcgggctttaaacgttgcacaactccacggaagaagaaactctgccacaaggcccgttcctattggataggaacttagtacgaacgggctgaggattagccctagtgcgctcactagcatgcatggagccccgggtttcctcccctggacccccaaacaagcaagcatagaggaaggagcaaagctttgagcccgctgtctagtctccccaagttctttcccctcctggctcttggtcctgagagtgggccagagtggctgcccaaaaccctctcctgcaattgtgtttgcgtctttgcgtagaccagtgggcgcaggggctcggtgccacctggcttctctgcaggcctcagttcctctcaggcccctgtgcagcgggaggaggacatggactgaggcgggaggagactaaagcatcaggttcagtttccactcagcacaagagagactgcacccctgcaaaagtagctggcacagagttgaactctcacgggtggtgtgcatggtccatggggaaacaagtcaacatgtcgctgtaggcttctggaatgttctgggaattttatttttgcctcctgctttttctcttgtgtgtgtgtggcgcggaggggagactgtgctgtgtgattgcagatgcatgtgtgtgtatgtgtgtgtatgtgcgtgtgtgtgtgtgtgtgtgtgtgtgtgtgtgtgtgtgtacgtgtggggtgtgtgcatgtgtgtgcatgtgtgtgctcgagtgtatatggttgtacatgtgtgtgctcgagagtgtatagttgtacatgtgtgtgctcgagcgtgtatggttgtacatgtgtgtgctcgagcgtgtatggttgtacatgtgtgtgctcgagcgtgtatggttgtacatgtgtgtgctcgagcgtgtatggttgtacatgtgtgtgctcgagcgtgtatggttgtacatgtgtgtgctcgagcgtgtatggttgtacatgtgtgtgctcaagtgtgtatggttgtacatgtgtgtgctcgagcgtgtatggttgtacatggggagtgctatgtgactgcaaatgcacctgggcatggatgtgtgggcccagccatcaagcgtggttgccattcctcagatgccacctaacttttttttttttaagacggggtctggctggctgactggtcccagcagtctgtgcccactggccagcagctggctctggggccactgcctccacttccgctgaactagcattgcaatctcaccactgcacgggcgccttttccaccttgagatcaagtcttccctcaaccaccctgtggctggcactgccccgtgcctggtggggcggcttgaggtatacaatcattctatatgtgctggctttcgggctttatcaagttgaacctcaatcagatctttttttgtttttttgggaggagttgctttttttcttctctctctctctctctctctctctctctctctctctctctcgctctctctctctctctctctctctctctctctctctctctctctctgagacagggtttctctgtgtggccctaggtgtcctggaacactctttgtagaccaggctggccttgaactcacagaggtctgcctgcctctgcctctccagtgctggggtcaaaggtgtgtgccaccatgcccagctctcaagcagttcttaaaggaagctgccatctatggcactggactctgtcagagggctatgctgaagttactctcattaaaaagttaaccacatatgcaaacgagagtattggaggtgtggggccaccttagggtagaaagtacctctggtttgtctagtaatgcttcctggtggtcgggtgaggggctcaagccatccccgaagctggtgtcttttgacaaagtgtgtgtggggggggggaggggtgtggtttcgggtcctagcccatcctttactggttcaggtcttcacttgagtcatcccagagttcccctggcagccactggaaacattccagagtgtgacatctttcaggaaacaggctcagttcctggaagcctccacagagaacaagctccctcccaccaccacatctttcttagaactctctctacctgccagcagctgggatgagcagcagaggtcaaggggtaattctccagggtctggagaagcctggctcctgtctgcctttagagaggtcccttaatggctctgcaacctgggagtcaagtcaaatgaaaaattcgacgagcccaggaaagggcaaagaggccgtgagtctcctggcctcttgctggctgaacccactgatctctgagtccctagcctttctgcttccctccagggacctggagaggggcatcgaagccagtgagcactctgactcatttactgtgaactcatcaagctgaggtttggcaagagtcccgtgggcgtcttgggagaactcttggtttgccttcatttcttcttgtagtgtttttctcttgaaatagaaagtctggttttaccaaaaagagatggaaagaccagagtattattgcatcagagcattagaagaaattgagaattcatcctttgtttcccacttgtgtgtgtttgtgtacatgtttgtgagtgtgtgtgtctctgtgtgtgagtgtgtatgtctctgtgtgtgagtgtgtgtgtctgtgtgtgtgtgtgtgtgtgtgtgtgtgtgtaggtcagaggtggacatcaggtgtcttcctcagccacttgctaccttaccgtcgttattcttttgagacaaagtctctcactgaactctgagctcagctattatgctagactgctgggccagcaggcccagggatattttctctgtcaactgagagctagcattactggcacaactggcttttttttttttctttttaaagcctgggttctgggggatcaaactcaagtgttcctgcttgctcaggaagtactttcccaactgaaccatctcccaagtcctagcctcccattcttaactttcagatgagccaggatttgaggagagaggattaaacacagaaagtaagaagtcagaaagtagaaatggtttgaagaatgaggaattcacagcttggtggggagaggttgaaaaccaatttcaaaactatctttaggcagggtgtggtggcacatgcctaatcatggcacttaggcagaagcaggcggatctctgtgagtttgaggccagcttggtctacacagaatgttccaggccaaccaaaattacttagcaaaaccctgtgcaaaaaaacaaaacaaaacaaaaacctaccttgggttttcctcttttttctatttcacactgaagacccacattttatcgggtgcctgttttcattccatcactaccagctaaagtaatgtaaactcttgttttttgtttttcaagacagggtttctctgtgtagccttggctgtcctgaactcattctgtagaccaagctggcctggaactcagagagatcctcctgcaccaccaccctgctcatggaaactcttggagtaccttgcatcacagggtaaacaggaatgtgttgtgtttattgttccctcccttcagtgatgagctaatatccattcctggggagctcaattctgccaacaataagctatctgtccaaaaggccacaagaaacaatcttacttccttaattgcatttaagacagcatcaggcattgcagtatggtttccatggagcagaacagcgtttacaaacagagctcagagccaaggcttgggaaagatgtacaaacagacaagcaggacaaggattcctctgggggggggggagggaatcacacacatttatatttttggttctgaaagtacccagaaaagcaaacatgaattttaaggacaagattatgtatttgtttactctctgcttatccagaaatgtctgaaggtttcatccaacatgcataatgccacaagattctttccaagaaaagaagaggctcaccaatttggaggcagcctgagctacgtgctgagatgctgtcacacacaaaagagtggaaagtggaaagaaaagaatgtgttatggctaaccttctttatcagcttcgctggcttcggaaccacctagcagactcacctctggctgtgtccaggatgtcgattccagcgaactttagctggggagggaagagccttcctggtcatgaagagaaaagcaactgataacagaatgtgtagcagtggttgggaaatcagcgtcctcaggtaagattcaccaggagagctgggctgagatcagaggtgcagctggcaaagctcacatagggtcaagaggtcacgttgtttcttttagaatgaaatgacgttctgttcgggaccccgagatctttgcagaagcatcatgagttttctggaaaaatgatttgagtttgagcaatggcgttctccatctggccgccgtcattgtccatgtggtcttagcaaggggagtttgcggcccatgtggccatcctcagtcctttggccacacatccctcccaatgatcagacatgctccagcagtcacccagtttcattctttcacggtaatgtcagcttgactagattgagacttgcctaggagatcagtgcagcacaaccgggtgtgtgaggggggccttccgtgatcctgacggctctgagctgatgaagagattaatcccaggtgggctcagcttgcagggactttattggaggtgatacagagtaggaggtggggccttgctgaaacaaggaggtcactgggggatgtgtctttggggctgtatctcgccctagccccttgtgctaaccctttcctgtgtcttgtcttccatgatgcccatttgcttttctttgtgtgataaatcaccatgaccaaagcaatttatttggactcatggttccagagggataagagtccataccatcacagcagagaaactcagcggcaggcagggacggtggcagcaccagcttgagaactgccaagggaagcggtgatggcagtgggcgttgagttgtcaaggccacctccagggacacttcccacagcaaggccttccttcctaagcctcgcagacggcatcacccactagggagaaagaatggaaatgttcactcaaagcgcatgcacagtgtgaactttttacacacagtgtgaacttctttctgtacaagccctcactggtgtaacgttctgcctaagttccttgagccaagccaccttgaactgaacctttcaaactgagtcaaatacatctttcttccttttagtttttctctcaggtattttgctcatagcaattgcaagagtaactaatgtgtccaccctatcaaaaaagatcaaagaagggccaggtggtagtggtgcacggggcagaggcagaggcagaggcagaggcagaggcagaggcagaggcagaggccagaggccagagggcagagggcagagggcagagggcagaggcagaggcaggcagatctctgtgatcttgaggccagcctggtctacaaagctacagagaaaccctgtctcaaaaagccaaaaagagaaagaaaaaaaaatcaaggattaggagagcacttgctcttgcagaggatctgaattctatttccagcacccgaatggcaggtcacaaccatctgtaaccccagtcccaggatccacatgatagacacacgtgttaacaaaatactcatacacataaagtgagatcaataaatcttaaaaaacaaaaaacaaaaaacaagagctgggtggtggtggctcactgttttaatcccagcacttgggaggtagagccaggtggatctctgtgagttcgagaccagcctggtctatagatggagttccaggataggctccaaagccacagagaaacgttatctcgaaaaaccaaaaatcaaacaaacagtttgctgcaatgtagcctaatggtagaatacttacttgttatgtcagggccctgaacaccacaaaccattaagtgtgtgtgtgttgtgtgtgtagatagatagacagatgacaaatacaaattttcacattcaaggatctttgctctttagaatggctaatgcctaatcatgtgaactctgggccaggcacctgtaaggtccacgctctgatgccgggtgggggggggagcagggcagggaagggggaccccagctgaagggattttgaagataaatactttgtttgccatcacatccaggccatgaagcaggcacaagcagcacacatacagaccgggacacagacagccccacagaggctcctgacctcaaagtcatatttgaatagagtcacataaaagtgtaattctaccaaacagtagttatattgcagattacatcactgtttacttttgggaaccccagacaaccggtgtcagtcatttaatactgactcatagcccgccatgtgtccagtgtcagttatgctttatttattctggatatctatatcaatgccatgctgtctaaacatgctgacccttacacgtgtgtgtgtgtgtgtgtgtgtgtgtgtgtggtgagtatatgtgtgttacatgtgtatatgtataatgcatgtgtgcctgcatgtgtatatgtgcttgaatatgtaatagatgcatacatgcatgtatgtgtatgacgaatgtgtttatgtgtacatgtgtgtacatgtgtgtctgtgtctgtatctgtgagtgtgcaagtgcacatacacacaaaagcatgtttgagactgggtcatatatatatatatatatatatatatatatatatatatgtgtgtgtgtgtgtgtgtgtgtgtgtgtggtttttcaagacagggtttctctgtgtagcccttggctgtcctggaatctgctttgtttttgttttttgtttttttccacactctactggagttctagttggttcatttttagaaatgtttgctaagttcaataagtttttctattgcaactttatgggctatataacttttttagtaatttattttgttgaacgattttgaaataattgaaatttggtgtacacctcaaataatacatatttactcatttaaaagatgtgatccatttgagctgtttttgtacatgataagaggtaatggaatctgctttgtagacttgcctagcatgcacaaagtgcacaagccccagcaccccataaacaggtatgatggcacttgggacatagaggcaggaggatcagaagttcaaggttatcctccgatacatagggaatttgaggcctttttaagatacagaagaggtggtgcgcgcctttaatcccagcacttgggaggcagaggcaggtggatctctgagtgcaaggccagcctggtctacaagaatgagttccaggacagcctccaaagccacagagaaaccctgtctcaaaaaaccaaaaaaaaaaaaagaaagaaagaaaaaaaaagttcccttttataagtgttgccttggtcctggtgtctcttcacaaccataggtcaatgactaagacatccatcacgacaaatgtataaggctgatactgaatttttttaaagattttatttattatgtatacaacattcttctttcatgagagggcatcagatctcataagggatggttgtgagccaccatgtggttgctgggaattgaactcagtacctttggaagagcagttggtgctcttaacccctgagccatctctccagccctgatactgaatttttaatttttacttttagtttagttttgttttgaaatagtatctctctatatccctggctgtcctggaactcacagagatccactcacctctgtctccccgagggctggcattaaaaaccttcacaccatgcctggcttacttctgaatctaatagatgaagacaaggcagcatagagaatttaagccggttggttgttcatggtgtgtgtagctgaggtgagagtgccgtgtgcccgctgtcctccagtgcagctgctcagttgctaacactgggaactttcactgttcctgataccagagcccctttgttgtacagaaatatcctcccagcctaactgcccaccatcttcaggagttctgctgagccggcttcaaatggatggtcgcaaactaccttccctcgtagaaggaggggtggcaggtcatgggacacttacctgattattcagccacacactgcacatagctgaatgcaattctgccttaattgcacatggtcttgggggcaggagtagagccacaggcggggggaaaaaagaggagacaggactttcacttgtgcagctacagggtcctctctgtcaggtgtcttaaggtcatccacatatctgccccacccttgccctctgctctgtgaggaaccctaataaactcagggttacactgtgaccttgtagaatcacatctcaggttattgtcgggaccttaggaggagggagaagggattttcggaacatttacatagccacatcctggttcttctattgggaggctttctgtgagcccctgtgctccggccagctgctcactcagccataaggaaaaatccctaagaaaactcacaacagagagtgtagccaggaggcagaatctaccagctggatctggttgcatagagttcggctcttcacaacaataatcacctggagacaggcactgttgcagacatctgggtattgtcctgtctagccctgactgtgcctaagcaaagaagctctaacaggcctcactgtcctaagaggaagctgaggcctgagtgagtgcccggctactaactcacctctgctttggtttggtctggcccctttgcatggaagtttcttagcaagctgtctcagggtcttacctcagccaagcatggctgtttcctagctgtcttcctattgctcccctccaatgacaaaggcttcccatgaaattcctgataagccagcttctcagctgggagtgcaaagtgacagtcacttcactgcaaaggtagaaatgaggaaccagttcaaacagaaagtccctgctggtcctggggagcttcagaggtcaacttgtcacagcctagagtcgtctgagggagtctcaagtgagggattgccagggtcagcttggcctgtgaccatgtctggggtctgtctggattgtagaacgatgtgggaggggccagcccaagcaggggtacctgggctgtgcaagagcctgggaatgaccgggatgaccagccagcaagcagttcctccatgcatttgacttcaagctactgcctggggtttctgccttgactgtagcttggatcgtcaactaaattagcccttttctccctaagttgctttcagaatgtcgaaccacagccacagaagaaactaaatactccccactccaacagccccagactctacactcacacaaagcaggaccttcccgtagacctcccctgagaaaagtctccccagagaataagcccaggccaagcacctcttgttgccagggctccttgtattctctcaatcccaaatacaggaaaatcccttgctccatcctcacacccgcccgaccccatcctcacgcccgccccgccccgatgacccgggaggaaaccgcaaagctgtttacttagcagctttcaaagtggcctcttcccctccctgcgttccaaggcaccctcgcctgctccctttccaggtccaggagcagtggccagaagctggcctttactaggtatccttgcaaggcagagactgactgactgctcagctctgttcagaaatcatgcccaccctggggcatgaccgtagggggccttggaaggtgtgactcgggcttggttttgtgactggcggaaatgccattagtctagacagtgaagaatgtgacagcttagtgatgaggctgaagtttgcctttggacactctaggagggagcgggtgtctgagcaaacactcggtcacttgctccctttcccgatgtgtcgatgacagcgcactggaggagagatggaaacgccatgggaagaaagggtgtgaaagtggttcacttattcaacaactcacactgcccggggagtgagcccggggagccggctcaacagtaagagcatctgctgtgccagtgtgagaacccaagttctgctgtgttcaatcctgggacctacacagtgagaagagagaaccaaattatcctctggctccacgtgcacaccgaagcacaagtgcatgcctctgacaagcaagcagataaacagataaatgtaatagagctgggttttttgttttgtttttaaacaggagttggaccagacggctcagcgttaagagtatttaccgctcttacagaggacctggctttggttcccagtgcccacattaggtgcctcacaaccacctgtaactccagttccaagggactggacaacctcttctagcctctgtagacaccggcacacatgtgttatacatacgtacatgcggacactcacactgacatataataatcttaaaagcactcgactacacgcgcctgtgatcccagcactgtgggaagtggggaagagggttactgggtcttgctggccatcagcttagctccagtttcagtgaagcacctcccacaaggaagtgaggcattgaaagagcaggacacacaacaccctcctctggcttccacacacacatgttcacacatacccctccacacacacgcacatacagagagagagagagagagagagagagagagagagagagagagagagagagagagagagagacggttaagacctgtcctggcacctgtgatcccagcactcaggaagattgattccagccttgttcattttgttcaaatgtgacctggtctggtggtctcgtttctattgtctcccactgactggaatctttctcatttagtccaccgaggacggttcttgtggaactgtcatgggataagttcccgtgagactcttttgggcttcatggccctgagctaggtgggcatttctgagtggcaggctcctttcctggcctcagggctcagagcccccatctgcgagcttcccctccaatctgctttctcctctgtcttcagatatgccactggaagagaggttagaatcgaaccaggccagaagagctttgcttggccaggcaatttggcttttatgactgtagtcattaatagaaagatgaggggcctggggcgacggctcagtggttaagagcactgcctgctctatgcagaggacccaggttcggttgccagcatctacttggcagctcacaagtcacttcggtttcagtggctctcatgccctctctggcttccatgaatatcaggtatgaaatgtattcacatgcatgcaggcaaaacactgtacgcatacatttttaaaaacatgtttttgtctgattgtttcctgtgtttattttttgagacagggtctcactatggagttcttgtcctggagctcactgtgaagacgaggctgacctccaaactcacagagctccccttgccctggctcccaagtgctgggattaaaggcgtgtgccacttcacatgcctcttaaaagtctttaaaaaaataagatgagacatttcacagctagaggaaccccctttcaaacctggatttcaggcaggctctgcagtttgtctctgtctcatccctgggctgtccagctgtggttggtggtcacagaaaactctgcctacagctcattgggtgagaaaatatagaaacctctgttttaagaactgaaattgtctagggtttgggagaaagtgataatctaattgggctttctaagcagatggttctgaaggtggatggatagagaaggtattcggaattagactcgatgaaggtcagaatcaagggcaccaacgatcacgagatgcgggtaaacggaggcctgtggaggagccagcaactgtgaggagctggtcccatatggaagccataggcctgaaggagcagagggaacccatctgggctccaggaaaatctcgagggcctgcaagaactcagtcattgtcacaccaagggctggggacaggaaagaaaagtcaaaaacaaaaatgcccaccctccagtcgcacactgccgacttccacaaagccagtcctcagagtgtgggcagaaaagtgtggaaaatggatctggtcagtgtggatctaggggcaagtgaggtctgccaggacatgtgccgagcaagaaaggtgtactggtatggggaactggccaagtcaaaagccccggtcccagtcctcttgtaacagagtgtgcgctgagtaagcaggaccagggaacccgtggtgccttcccatagagggtgccacagctatgaggcactggagcttaccctcactgggctccccccatgcagcctggggtgtgggggacaaggccattttaaggggcccagggactggccagcatcttggagtcagtcctggtgctaacttccagcaaacctataggatgcacagagtcaaccagggactttctcaaacgctcttttcaccacagtgaggcacactcagaaagaaagaatctattcatctccagagtgcagtatcttcagagttgtgtggctgccctgcccccccaacccccacccagttcctgataaccagagatgaaacttgaacagcaaaaaggaagtctccaggctcctaggagcatcaaatcctgtttctagatggtttcagttcttaaagacacaggattccatattttctcacctaatgggctggagaaggtttgcagtgactgccaaccacatcacatggcccagaggggaggtgcagacacactgcagaggctgtctggaatccaagtttgaaagggtccctctggctgtgaaacatctcatctttctccttattaatgtaaagatgtggtttgaacaagtgcacagatttgcacagtgggctcagggttctattagctctctcttgctttttctttcctaatcctctacagggttcattcaactcagggaaacccaaatagtggcttttgttggaggtgagaaggcccaaatgcacacccttagggtcacttgcagggttacctgagaaggatgccagcctgtttgtagcatccatgaagtatccatggatcctgagaggactgccagaagtcttgctaccttcaaagcatttattcacaattagttatgttttggcttctgtggttgggataggacagagcaaaaccaaaagatgaagcaaaaaagtgagtgggggggggtgggccaggagaagtaaggggcccaagcggagggctcaggcagcccttgtcacacaaacatgaaggccagcactgggatcccagaaacatgcaaaatgccaagtgggcttggtggctcacctgtaattccagtcccgaagttggcaatgggtttacagagcaagtggggctagtgcaactctccatagcagtgagagactgcctcagagagtgagatgaaagatctctgttgtgggatatttgtttgcactgacattctgagactgacaaaaaagtctgctttgaatcagagggttgagttagcaactagttgaccagaattagccatagaggttttggaggacccaggatacaagcagagagatacaggaagtagcaggggcccctttggattagcgtgcgggggggggggggggctgtcactggttgcttctccaaccaaatcagggttttaccctgatatctgaccctcgagttttatttaataatagaataatataagttaaacactccagatctccatatcagtgagctccggattcaactgagagaccctgcctcagtgaagaaggtagatgaacagtggacatcaaccttggacttctacacgcatgtgcacagacatgcaaaaccttagatttccacaagcatgtgcacagacacagaaaagcatgcacatatgcacacccaggggaataggctgcagtgtaataatacggtgtgagtggggtgcacccctggtggagcacagacacaccgtcaggcagaacttagatggcaaggaagttttattgggaagggaagggagtggagggacagggagagagggggaagagagagaaaaggacagacagacatctgtctgccacctcagagaaatgacggaaagacagagcaggtgtgggcagagcttgtctcctaaagggacctttgtacccgagtacagagccagggtactgcctgccgtgtgcacaaaggtgagcaggtccccaaggggcggggccgggtgtgcctggattacaacacccaatgcacacgaagaatggaaaaagacaaaaggtgttgcgtacactgagaagaaagaaaggaaacagttcttcacgtattccccttaggcccaaggggctccttcactggagaccgtggaagaggacccttgaggacagtgggctctggcatatcagggtcctgctacgtgcgtgtgtttgttgaagtaagcaatgacaacaggaagcagacacaagggctccggagggcatctggtcaggtctgtcgggaatgcagaaggctctggagaaagcagtagcatagcctgtgacaaggattctcccatggtgtcagggaagactagggcctggattcaggcagcgcttcccagggcagcagaacaggtgatgccaccagagtccctgccttttaggaatgtcactcaaacatcaatacactgcctggcttcctgagtgtccctgagcttgcagaactaaattatctttcagagacaccaagattgttagatactaaaaaccaaaatgttaaggggctgagagggcaactggtcaagtgctggccaggaaagcctgagggctgaggctgggtcaccagaacccatgtttggtgtggtttgtttttaaaggcaggcttggggacacatacctatgactccaactgtgcacctgtgccacgagcaagtctgatgtattgagcgaaagcctggagatttaaatgagagacaagacatctggtcgtttgtgctaagagtgtgagtgtgagagtgtgtgtgtgtgtgtgtgagagagagagacagagagagacagagacagagacagtgtgagtgagtgtgtatgtgtgtgtgagagagagaggtgtgtgtgtgagagagagagagagacagagtgtgtgagtgttatgtgtgtgagagagagaggtgtgtgtgtgagagagaggtgtgtgtgtgagagagagtgtgtgtgtatgtaagagagagagagtgtgagagtgagtgtgagagtgtgagtgtgtgagtgtgtgtgtgagtgtgtgtgtgtgtgtgagtgtgagtgtgtgtgtgtgtgtgtggtgtgtgtgtgtgtgtgtgtgtgtgtgtgtgtgtgtgtgttgcagggaaggagcagccttatatacagacttacagcagagtggaaaaaccccaggtgtaagagctgtgttttcccaggtgtggttgatgccagtggggcaaggccagggctgtaagccaggactagagaacaggatgcacctgtggttattggctgacaagcaactcacagagaccccgtgggggctggggcccaacatccaactacacagagtagtagacaagtgaactcctggagctcactaaccaaccagtatccccaggccaatgagagaccccgacgcataaaacaaggggaatggcttttgagggtatccaaggttgacctctggcttacacacacactcacaggcacacacatacactcttgaacacacaggtacacacacatacacacacttgcatgcatgcatgcatgcacacacacacactaacaataataacaatatatttcagcctgcagatgcactcatttgtagagcgcttgtccagcatgcttgacgcccaggattctgtccccagcatggaggaccagaagttcaaggtcattttctttttttaagcaattttttttaatttaaaaaaagagatttatttaggggttaaagagatggctcggtggttaagagcactggatgcttttccagaggacccgggttcaattctcagcacccacatggcagcttacatctgtctgtaactccaattccagggtatctgacaccctcacacagagacatacacaagtaggcaaaatgccagtgaacataagataaaaataaattatatatttaaaaaagatttatttttatttgatgcctatgggtgtttttcctgcactaatgtcatgaatcacttgcatgtagtgcattgattaactaatatttaaagggcagacaaaccttggctttttactttgacatgaaatggccaagttctacaatttgtattgattggtgatcacaacacagtgaaggagttaagaaattgtagccagttcaagagagactgcagagagaagtcatttggcagaactgcggggcacagggcatgctcacacattcataacgtggagatgaatgtgcaaacgaggagagactgctctggagaggagagacaagggcaggatgtagtttgcaagaattatttttctttgtctataaatctgctacaatggacagagttctcacctgggtctcagagagactacaattgcctaaggggtgtcctctaggcaatgctgcttcaatttccctcagacatcttacctagattctagggcccagaagtcaccctcacattctgtcctgtggccaggaccactgatttgtgtatctgactcgcccttgtacagatgatacatgaagaagtgttatggaaattacttttaactgtgtaaagctgtgttacatttgtttgtgctatggagtgttactttaactgtgtaaaggtgtgttacattagttgggcggtggtggtgcacgcctttaatcccagcacttgggaggcagaggcaggtggatctctgtgagttcgagaccagcctggtctacaagagctagttccaggacagcctccaaagccacagggaaacactgtctcgaaaaacaaaaaacaaaacaaaacaaaaaaaaagtgttttgcatttgtttaaatgatgtaaagatgtgttacatttgtttatgcttcagactattactttaactgtgtaaagctgtgttatatttgtttctgctgcatttgtttaattatgtaaagatgtgttgctgtttctccttgcctgcctaaggcacctgattggtctaataaaaagctgaccagacaataactagacaggaaaggataagtggggttggccggcagagagaataagtaggaggagaaatataggcttgacagaatgagagaaaaggagaaaagagcaagggaaaaagagagggacatgcctggggctagaagccaggcagctgccagccagacactagaagctgtgaaagtaagatatacagaaggaaagaaaaggaaacagccctggggcaaaagggagatgaagagaaacaggttaagttacaagagctagcaagaagtgagcctaggggctggagagatgactcagaggttaagagcaccagctgttcttccagaagtcctgagttcaattcccagcaaccacatggtggctcacaactatctgtaatgagatctggtgccctcttctggtgtgcagatatacatggaagcagaatgctgtatactaaataaataaaatcttaaaaagaagaagaagacgaagaagacgaagaagacgaagaagacgaagaagacgaagaagacgaagaagacgaagaagacgaagaagacgaagaagacgaagaagaagtgagcctaagctaaggccaagcattcgtaactaataagtcggtgtgtcatggtttggagctgcttggtggcctaaaagcaagcctgctacatagaggctctaagcaaacagtaagtgctgaaacagtcactgctgtaaaacaaataaacagctgtatacggcacgacactgaagaaacgtgtgcagtgcgtgaaggccacatctcagctcccgtcatctacctgctggtgctctcatccttgttatcacatggcctttcgtaagcaatgtcatggctgactcgtcggaattcctaatttacaacaggaacattgacccagaagtattataggaacagggactccacaggtggcttggtgggtaagagcacttgctgagtaaccctggcataggcagggcatggtattaggttagttgatttttttgttgttgttttttttggttttttgggacagggtttctctgtgtagctttggagcctatcctggcactcctctgtagaccaggctggcctcgaactcacagagatttgcctgcctctgcctcccgagtgctgggtttaaaggcatgagccagcaatgcctggcctagttgatacttttttgcaggtgtctacctaaaacaacacacacacacacacacacacacacacagagagagagagagagagagagagagagagagagagagagagagagagagagagagattcttaaaaaagaactacaggaacaaaagattgagtaaagaagaaatgaagggaggaagacatgagactccctctggggagaccgagacaggtgtgaaggtttgggaagacagccaataagagggaccccataaggggtgtgtgtccttcccttgctggtcttggtcctacttggcatttgttcacttatgctttggacaataattcataaattattattgatttttattttattttgttagtttgaacagagtctcactatgtagcctaggctggcctggaactcactatgaagccttagctgacctggaactcacttttagtccaggctggcctggaactcactattagcccaggctggcctggaactcactattagcccaggatgacctggaactcactattagcccaagctgacctagaactcactattagcccaggctggcctggtaagtcactgtgactcatccacttctgcctcccaagtgtgagggtcaaaggcatgtgctaccatacccagcttgtttcggctttttaaaataactgattttcatgagaaatggatcaataatagctaacagtgaaaggttcaggcattatgctggcctgcctgttacctggtagaatacactcaggcaggaccctggtcagcccagggttccatgggaactgagtctgcacgaaggtttaaaggaccctttaaaagacagaccccacccatttatactctctctgcttctttgatctctgcccctcttctcttctctctgcctctttctcttgagactggacatggcggtcagccattaaccctgttcctcttctcagtccctctatctgcagggcctataataaactgattaatatgtctcttagtctcatgtctcatcctgcgctattctttctaatttaaacaaaagaataacattttggcgcttgtgtctcatcttgccccaccttcttcatttctaatttaagcaaaaatctaacaaacaggccattcataaacccctgcaaccactaaagaaccatctagaacagtggttctcaatctatgcggctccactccttaggggtctacatatcagatatttacaactcatagcagtagcaacattatagctatgaagtagcaacaaaataattttatgacggagggtcaccagaacatgaggaactgtgttaaagggtcagggtgctaggaacgtggggaaccccggctctagagcacattcacttgctctcccatttgttctagatatttcttgtttttgtttgggactaggcttcctgtatcccaggccggcctcaatctacgtagccgaagataactttggactaactttgaacgtctgattctcctgctttacctcctagggctgggatcacagttgctaactgaatccatcaaagaagtcccaccgagctcactgtcactggcaacagatagacttttggcaagagtcattctaatgacaatggtgaggacaacatggagactgggagccacactcatctcccttgtcccaacagaaagggggacaattttaacctattttctagtagctgtgaccaaacacctggcgagaagcaactcaagggagaagggttgactttggctccatttaagaagggagaggggcctgttgatgggccaaggtgtctgccgccaagcctgatgacccgacttcaatccctgaggccctcacggcacaaggggagacctcatctacacaagttctcttctgaccgccgcatgtgcacagtggcatgtatgtgcccctccttccacaaacaaataaataaatgttttaagttttaaaaacaacagaagaaaggctatggcccatcgtgtcggggaagggatgctgcagacggtgaggcagctggacacatttcgcctgtgtcaggaagcagagatgatcgctggtcatcagcctttctcctctgtcttcagcctgggaccccagcccctgggatcttgctgccacacttaagacgggccctcccacctcagttaaccaatctagaaagcccctcactgacaaggacagaggtttgcctctgcgatgattcaagaccctgtcgaactgacaatgttaaagtgtggcggtgtggtttctgtcctgagaagttgctacctctaagcaccagtgcattctggccttgactgcatttctgagggcttccaacagcgctttgttctgcttcagcgctgccctggcagagagggggatgacaggggcacacaggtcactatctccctccctttgccctctccccctctctcctctctgtctctcttcctctctctccctctccccctcccttcctcggtcatgtgccccccccttaagtgtcttcttgtgaggcacggatgaccccaccaggacctcctgagagtagagggaaggcagacacattggtgagtactggggctgtcccttttctcttagctctaactggggcaaagcctacagcctcctgtcagtaaatacacccaggactgcagagaaagaccccatcactgggaaagagaagggggtttcaagtcttttgctttcccatccagtggagcctttgttcctaacaaggttctaggtcaaaaccgggccctaattcagacctgaaagccctgagctgttcaaggctgagctggtgcaaaacgcagcaagatttcggacaggaaattgtgtggctgtgtgggtgtgagggaccagcttcctccctctctgacactttctttgctttggggaccttgctcagcagcctcccctcccccaagcccagcagaggcctctgccacagcagcagtgaaggctgggtgattcccatcttcagccagtcccctgtccctcatgtctcctagacacgataccagttttgacaccatacaggactctcacttcttcagagtggaggcagcttggagaacgtttggttttcggaatgtctgtcctctcctgctttctcagaggggatccagtccccagcaccttgggctatccttgtgtgggttccctgccttactgcagcactgcttaggaaacaggcagaggccttttgggcctcctcaaattcaagcccaaccacactgctgctagtgaggaagtctcaagacgtcagaagtaatttgaattcagttattgatagcacatagagcaatctgcatattggaactaactggtggctctgggatgtttagaaaacagcagaatttgtagattgcctctgaggctacgagtctacccctcacagatgggtcatcctcaaccacagtcccctgccagcacattcagactccaggaacaaggccagctgctggccagggacattggcccgactgtaggcacccaacagggagcactcttgaactattcacccagtggggagcactcttaaactatgcacccaaaggggagcactcttaaactatgctcccaaaggggagcattcttgaactagtgacttcctcttcttgcactggaaaccctcatctgcaaaatgaagggtagatgggatgactttaacatctcttgtacttaaaaaaccattctgtggttctcccagcagacataaacgcatcttataacactagccttcttaggcctcataaaggaattaggcaactttagccctcgcatgttagagaccaaggggtgcctcccaggacggggattgcaggagtagccagtatcaagccctttgcggaggaacagccacaatctatattccctttcttcattgcttttgcttcctctccaactcttgtttttgttagggagcgtgtgatacatgtgttcatgttcatgtgtgccagcacctgtgccttcatgcatgtcgaggggggaagtccactggatgtctgtctgtcttctccattgctccacactggatgtctgtctgtcttctccattgctcctgctccgcactggacgtctgtctgtcttctccattgctccacactggatgtctgtcttctccatttctccgcactggacgtctgtctgtcttctccattgctccgcactggatgtctgtctgtcttctccattgctcctgctccgcactggacgtctgtctgtcttctccattgctccgcactggatgtctgtcttctccattgctccacactggatgtctgtcttctccattgctccgcactggacgtcttctccattgctcacccccggccccccattatttcttctttcactttcttccctgtcccccagacagcatttttccactaaacccagcatgcatcgattgggccagactgccagcctgttaaccactgagctccagggcccacctgcctctcctctgtagtgctgaggtcacaggtgtgctccacgggtagctggcattttccatttacgcagatgctgagcactggaactcagggcctggggctcgcacaaggaacacttcactggctgcgtgatccggccagcacagctctctcttcccttttttcttctttcatttttcttccttggcatctgcactttcctttctgtctccacttcttcttccctttataagacagctccacctaaggttctgagctggactaacctgatggtggtggtacaggcttttactcctagcactgagatgggcggatctgtgaggtcggggccagcctgctctacagaatgagttcgaggacagacagggatacacagagaaactgtcttgaaaagcaaaacaaacaaacaaacagacttcaccctccacaacgttgaagggccaaggaaaatgtaaggacatggagactgctctcttttcccacagctttgcttggccctgcatgtctacaagaagacgtaggcacttgaggggggcagtctgtccactgaccctgttctgacttacagactgtgcaagctgagcagttgggaggcacaaccaggaacagaaattctcagggctgtagagatggcttggcagtgaaaagcaccggttgctcctgcaggggacccagaactcacaggcggctcacaactgcttttaactccagttccaggggatccaacaccctcttctgacctctgaggactactgctattaacatgccacagtgttggtttctgcatgtgcacagacatgcactcaggcacatgcataaaataaaaataattattttattgaaaagaaggaaagaaacgaaaaacaaaaacaatgccaccagtggggagtaatcccagtacttaaaactctacagcaggggaatttctgtgacttccaagacagcctgggctacagagtaagatcttgtctcaaaaaaataaaataaaataaaataaaaacaataacaaaatctgtggctgaaatgaggtgaggggggtcagatagaaggctgggtaacacatgagacaggtgtgagtcacagccagctcacccactaggaccaaactgggtcagagacttattggaagcctcggtggcaaaggaaatgccactgccttgccctctgctacagccaagggtacttccccatctgctatggacatggggagatgaaacggagggggacctactgcagtggcatgaccttcccagaggagggacgctatgtgctctccatcagaagaagttggacaaagaaaactcggtaactatctttattatccaaattccagacagaagatcctgcctcggggcaggaccggctagctgccaaggtgaacgaggagtgactcctgcaggtagctcttgtgggccgccttctggatccaccactctagggtttgaggacaggtgcccccagagtgcatgatgagcccaggctggccccagagctcctaggaggggcacagccacaggaactcctggacacaggtgtacagggaaactcttgggtgtgcaaacccaggttctaagctgtatgaaaaaggagcgagctgtggtgtcatcggggcagacagccggccacagggtctggccgaacctgcacaaagttcatagggtacagaagcagggggcacaacttctcatgttccttgagagcctcactcaggtgcctcagctcctccttcagctttgaaatctccctgcgcagcacggcattctcctgctccaggcactcgtactcctgtccaagagagaggagaggtagagacgggcggcgtggaggtgcatgacagcggtcccggcactcgggaggtagaggcaggagggtcaaagaattcaaggccagcctgggctacagaactcttcccttttgttttattttgagacagggtctcactatgtatcccaggctagcctggtgctcactgtgtgtctcaggcaagcctggtgctcaccatgtatcccaggctagcctggtgctcactgtgtgtctcaggcaaggtgctcaccatgtatcccaggctagcctggtgctcactgtgtgtctcagattagtttcaagcttgtcgtgttcctgtccacttcctatgtactagggtttcagatgtgcaccatggtgtttggtcaccttggtgtttactggcttcagagctctgtctccccaaaggaataaaatggtcctaacagtacagctttccttttgaatcaatactactggggtatcatgaaacgtgtcttatgaagtgtctgtaattcagggagtggtgacaaacgtgtatgtacacctgtgttgatatacaaagcatcagcttgcacctccatcgctccaaagtggtccctcctaccatttacaccagctctcatccccaatactgacctgctttttgaagatctctggtgggttcatggccaccccaataccaagagcagtacctggaacagtatgccttggctgcactgataaatgcatggatgcaagcctttggctgcactgataaatgcatggatgcaagcctttggctgcactgataaatgcatggatgcaagcctttggctgcactgataaatgcatggatgcaagcctttggctgcactgataaatgcatggatgcaagcctttggctgcactgataaatgcatggatgcaagcctttggctgcactgatagatgcatggatgcatgctgtcccttccagtactcttctgctgtgtctactgcatcagggtgaagaggctcagaactggaggggatcaagaactcttgtcatctcccccaaactgtggaggaacttctcatatgcagagctagctcacacatccatcttgggctgggcacccttccttcaagggacagtccctgccatttctgtgatactctactctctttgtagtgatcgaaaactcctccacacccacccattgagctgggctcaacccaatggagccacacaggatgaactcagtactttgcaacctcagctcttgaaatgatgggcgacacactcatccctcccccttggatgctctctgagcctaaatgtctcgagtcctctgagtttcttgtgaaggactgctggcccctctgcccttgtagccaccacccctggcacacactccaagttgccggctcgctgagatgttactctcggaatgccgtcctccttcatgctggacctaagccacaggaggcgtccccgagtgtgcagaaagctaagctccaagtgcaggagctgctgtccccactcaagtgacaattagagcctggagacagggcttcctgcaaccactgaatcccactgtgttcatttgaatctcctccacggagtcagctcatggatacttgctgtcacacaacctcatggcttccgggaacttggttagtcctttgccctcttaatccaggccatagtccacagctcatcaccagcctctccaggctggggtgtctttcagtcttgctgagcggtcacctccactcatgcctagcctgacttgtttggttagactgtgacccaagcgtaccgggcacttctcaaatactaatcatttctaataaacatcagctaagaagtctggccttagagcccccgagacacgcatgcatcctcagcttagcctgtgcagctcccctcaaccccattgctttccttttctctgtgagcttagcatgagatcaccacctccaggaaggcttccctgggatcacagcacatacaggtctcacatttctcattctgagttctctacacagacgtacactgttggatcccacttatagtaagtaatgtctctccctaaaagtcagagatgccgagccccaggaacttctgccaccctcttctggactagctcgagtggtccaacctgtgtgctaacaaccactcagcctgttgtctgttttcttcccatctctagaaacctccctttcggggccccaagagggactgcaggcacgggccatctcaggaaggcttctccagaattctctccagggcagcagccttcgcttcctccttcctgtaggctgccctgggtcagtgtggcttcaccagtgcagtgccctccttgcagctgcctctagttcctgtgacctctgacctctagccagctggagtcctggcatgcagatctggtgccctgcacctgtgcatgacacagatggcaggaacaaatagttccagtgagctgttttgctggattttcagtttccattcaatcccatactccaaaccacctttctgtagttcctgagtctgcagcaagatgtctgggatttgtgagcactgtctctggacttagcctgactccaccccaggtgcttctgttctctaacccactgctctgagagtcactagagtcctctggcaaaggccctgcacctgccacctccgggtggggggcggtctggtctcagaaagtaccaccacctgctccctagtctctttccacacatatgcattgtgcaaaatgatggatttcatcaccacctgtgccatgcactttgctccgcccaatcctctccagtgccccaagtcacaccactggtcccttcctgttacccacagggactttctttcctgggatttaagttttattcttatgttagtggagggacttttagtgatccggtggaattggagggaaaaataaaaagagaagcagtaaaaacaaccaggcgggactaatcataaataagaggccctgggaggggaggccgaggccactgaacaccaagtaggaactaagagcaaagaatagtaagcatctctcagtgaggagagaggaatagacttaagctagacaaaaaaaaaaaaaaaaaaaaaagcaagagagactacagctcaggggtggagcatttgactgcagatcaagaggtcaccggttcaagtccactggtgacatgtcaaaacaccctctgccatgcatgcttgctacttcagtttactgcccagggagttggggctccttggctaagagagcatcagagggtgctgtgccacctctatcccaatcatctaagtcacaccctcaaagcagggccctcagacacgggtggtggagctacaaatatcaggtgagcctcaaaactcacgctgcttgagctgggaatgtagctcagttggtagagagctttcttagcattcatgaaacccagagttcagtcccctataatcctaacactcaggaggcagaagaatcagaagttcaaggtcaactgcagtctgatgccagtctgggtttcacaagaccctgtctcagaataacccagtggagaactgactcctgcaggtgccctctgacctgactccacacacatgctatggcacatacacactcaaatgtacacaatagattaagatgtaataaagcaaccgtcctcctcacacagaacagctgagcatgtggggctgttgagtgggtgtggtcttgcatccagggggcaaagccagggactctgctcccatacccttcaaggtcctgcccaatctccacccacccacatccagcaaccaggcccaatgacagttgtgctgaagttgtctttctggggtttctagggccagggtcatttgaagcagaggacatgaatgaggatgaacagaggcctcaggacagtcacacagaggacccatgtcacaagtgagaaatctaagctctgagaggccccgagaccctgagataccatccccagcgtcaaggccaaccccaacactcaggcatcaccagttttgccttctttcagcagtgtgggtccggatttccccacaacagttaccagaattgagatctcaggactctacagttggtctgtcctaagccttaaaggaagagggttcccatttgaaaaagtgccactgcaagagtcgtacaaatgagtgtcacaatcagtttctaaaccgtgtgtgctgtcaccagtattctttcccatcaggcactatttgacatccccatgacaacactcaccacaatcccacattgcccaagccatttgtcagtttgtgacatttaagcctcccaaggctggcattgctcccacccttgtctgactcaaaatcgtttctcggtctgacatctttgggtgcctggtcaaatctggcccatttctaagccaactttcagcatggcacaggcaccctgcagtttcatcgtggttcccatctgggaatgtagactcaacctaatgcttcccagacagaaatgcagatccaagttccacagaaagtgtcaacactgaacactgggggtcagggacactttaggtcacaactattagcaaccatgaccttgaggaaaactcctaggagtccctcagtttggcccagaagaggagagggaagtagccaagaaactcacaaaagtgagaggccaaggtatcttgggctcgaggtcagctggcatgagtgaggggcacagaagagacagatggccccattagtgcctagccctgtattcagactgtgtgtgctccctggagagccaggtcctagggagcacacacagcacaaacacatagcacaaacacatagcacaaagccctcactaggtacagagcacaaagccctcactaggtgcagagcacaaagccctcactaggtgcagagcacaaagacctcactaggtgctgaccacaaagacctcactaggtgcagagcacaaagccctttcttgtcccgaacactcccttctgtggcattcatagaagaaaagcacacaaccagagccactgtgacattcaggggtctactctgcacttgggacagggagaggagaagataaggaagcacccaggtcgtgggccactccccatccagaatcaggcggtctcagccaccaggtggctgtttcccaagcccacagctggcttctctccaggtgtgaggtttccacgcatggtgtcctttcctcaacctaaatgtaccctgggagccccaggtcccctgggctttccagcatgatctacagtgatgtgcttagtgcctgtactccattcaccatatctcagtgacaatactacttacccctcttttcaacagtgcctcactccagggtgcaacacaaaacacagattccccatagctatagcatcctatggaaggaggctgggaggagaccatgaagggatttcccacagggtgtctctgggtccatagctgccaggcttttattttcactttcctaagacagtttcttgcttgctaatatcccctgtgaccagtgacccttcagtgtaactaatggggacagccagggccacagctttgtagtccatgcacacatgtagccactgtcctgacctacttgacagcggctctcaacaacgctggccctgcagaggtggtgttgctcacctgtgtatccagtcccggtgaggaagagaatgacaaatcccctccccccagggcactagcttcagatcaatatgccctgtcctagggagcgcacagctgccaggccacacagaccctgggcagaagtacatcttaggaccctgtgaagagcacgccacccctggctttacaagggacaaggtaggagcagcagcaacactcctaagtccctggttcacttggttatcaaggtcagctacgacacactgagatagaacgaaagtgccctttgcatgtccattcctggcactcctaagggcatttgttaccttctgtggcaggaaaaacaccaacccctaaagatgtttcctcctaatctttgggacttatgaaaggaacctaacttaacaaaagggacgagagtatggagcataaatggggggggtcaccccagcaggaccaaaagcatcaggtgagccctaagtcaggagggagaggaggtgatgtaacagtggggcagtactgctttgaagatggaagaccacaaaccaagggatgtggaactccccagaaggtgacaaaagcaaggaaatggatcttctcccgagcctgcagaaggaacacagctctgtcagcaccttcactgtagcacagtggaatgcatttggaccgctcgggagggcaatgaattttctggatttcattacaggaaatgaatcctatgcttcctaaggtctctcttctctgagactccacagcaacactgcacccaaggaagttcttggtaagcacttttggatttactgtgttgccttgtctaagacactcggtcacctctacacacaccatcactcaggatttacaaatggctgtaaccctgattggactgaaagcttcttgaggggagggacctggctctccagggagcacacacagtctgaatacagggctaggcactaatggggagtcccctggtctccagagaaggctactaagcaacacagacccttaggacagtacgacctaaggacctcaacctcatgaacaagagggaaggaccgaggcaaagggtattgccagtattctgtgcaagttttaagatctcatgaagacaagtgagacctcccctgaagcccatctagagaccctgacctctaggcgtcagccttcctacttccaacaaaggcactgcacacttacaatgtatgccatgctgtgtgtttctgtcggtgctacctggagtgtgtgcattctaaatgtgttccagttgtggtgagggtgttttcagatattctttcctctctcctaacaactgagtatctgagctgtcaaagccctgatcagctttggggaaacatgcatggcgtggggggggggactgcacagcaggagagagctatactagaggggggggactgcacagcaggagagagctatactagaggggggggactgcacagcaggagagagctatactaaaccttaactctgtacagcagcagtgcacagctaggactggaaacatcccccacccctcaccagtccctaaggggagcagctcccagtcctagttgtgggactgtgtaggtttacacaccccagtcacggaaagcacaatcatgggggtaggtaaatggcactgctgtggctgaatgtgtccgccaactggctggcctgaaaacttggtccccaaacagcaacactgtgagggaggaccttggggagatgagtcacagatgctatgttctcatgaagagattaagtcattaactggtggttgggctaccatgggagtggctgcttacagaagcaagttctctgatttgtttgctgtctgggccttcgtgccctccactatatgaacacatagcacaaagccctcactaggtacagagcacaaagccctcactaggtacagagcacaaagacctcactaggtgcagagcacaaagcgctcactaggtgcagaccacaaagacctcactaggtgcagagcacaaagacctcactaggtgcagagcacaaagacctcactaggtgcagagcacaaagacctcactaggtgcagagcacaaagccctcactaggtgcagagcacaaagccctcattaagtgctgtgcagataccaagttgatgcggttccgtattctgaaacttctaagcttccagaccctgaagcttagaagccaatagtctcttttttatcgatgacccaatctgtggtattcattaatagagaaaacagaccagatacaggctcctgatgtgagagataagccaggcggttaggcgccatgagccgccatgtggaggtagtgagaagagaaagtcttggtgaagagaccacattctgccacgaaagtgcttgcagggagcttgcagcagagccccaggggatgcctcagccaaagtgaggtcctgactgagcactaggcctgcctgtaagcaatgtgtggatggttaacgctgatgaaaggacaagttagtagagaaacatcccaccacacgatgagaaagcagccgagtatcaaaccttaatcaacgccaacacctgaggaaaatacagatgctaggtggtggtggtggcacacacctttaatcacagcacttgggaggtagaggcaggcggatctctgtgagttcaaggccagcctgatctacagaacgagttccaagacaaccagggctactcagagaaaccctgtcttgaaaaacaaaacaacaaaaaaagaaggaggaggaggaggaggaggaaagaaagaaagaaagaaggaaaacagacagaaaggagaaggggagggaggaggagggagaaggagggagaggcagagaaaggtggcacgcctgtgatcgccgtactcggcaggctgaggcaagacgcagactctacagactacatagcgagaccgtctcgaaaacaaactataccaaaacaaacaaacaccagagaccccacagcttggcagcaagcaggcacggcaatggagtttacatttgatccacaggcacaaggcagagagggagagcgctaaaccgggaaggtgtgggcttttgaaacctcgaagtccactcccagtgacacacctcctccaacgaggccacacctcctaaccctcccccaatggtcccaccaacttccataccgagcattctaaggtatgagccaataggggccattttcattcaaaccatacacgcaggtgaggcaagaatttgaaaaggaattaaaagcacaaacagccattttgtttagtgttttcaatttttatttttggttgaaagagggtctcaggtagcctaggctggaccgcaaacttgctgtgttgccaaaaatggccttgaactcctcatcagcacaagagccacctcacccagcttcttttcttttatttatttatatttatttatgttcttttttgaaacagggtttcactataaagctctaacttgccttgaactcactctgtagactaggctggctgcaaactcacagagatctgcctgcctctgcctcctgagtgctgggatcaaaggcgtgtattatcactcccagtagtgtgagtgtgtgtgtgtctgtgtgttgtgtgtgtgtctgtgagtgtgtgtgtctgtgtgttgtgtgtgtctgtgagtgtgtgtctgtgtgtgtgtctgtgagtgtgtatgtgtctgtgtgtggtgaggctgaccttggccttctgtcagcctctacacccaagtgccaaggtaacaggcatgcaccgccacacctgacttatgggggattcagtctttacccaggacatctgtgtgtgtaccaggcaagcactctaccgaaaggcttccccaatgctttactttttactttttactattattattgtcatttcttgagacagtctttccctagttcaaaccagcctcaaactgggtatcctcctgcctccaccgagtgctgaggacaggtgtatgccaccacgctcagcttttgtttgattctttagtgacagcaaatgcaatgtgggaagcacccagaggctggcttgaagggaagaggcctgtgaacaaagaagcaaaccaacaggctggaaagacccggcaggatacagagttgtgatgagcatggtgacatcatcacccggccccctccccggggcacaggacggctgtccctgtggcagtcctgccctgaccacagtctcacctcatggagcttgtcagctttctgggtctgcttcttccggcttctctgagcagcaacccggtttttctctctcctccgaaccttcctgtcatcatcctcggggctctgggacatgtggagaagacacaatgttcagtcctctcagctttgctcacagagctccaccgacggtaccccctgtaccgctagccagctgctgctggcccttgttaagaggcgccccgtccgtcctggggcttcgctttatgttcatctccaccccccatcctgagaaatatgcactgagactgtcatttttaaatgaggaataagaggcctgggtgcagcctagtggtgtcacgtttgtgtgggatacgtgaggccctgcgttccatacccagtaccacaaaaaaacaaaaataccaagagacaggaataagaaactcaggttagggaagttctccaggtatcatggccagcgtggggtgagcgggaagtggaactcaggtctgctggtctccaaaccaacgttcgctcgcaaacctctgccccacagggcgtttgcctggaagagctgtagtgtcactgctcctctgagagtgggaaaggcggggtgtctgccctctgaaacttgctgggcaccgtctttacaccaccgcacactggcaagaccttttaaaaccgtgcagaccataatcatgcatttattactaattgcagccacataattctaccagtgcgtagaacgccaatgacgacatgctcacttaaacaatgcttggctgacattttctttcagaggtcagggttattccaaatgcaaatttgtgatgtatcttgaaagttcttaaccaaatatccaaaaattcttcataaggtggcatgaagtgggcaggcagaaaaacttattcagtggaaaaagtttgctttccagaaatgcattggaaccattgagggatcgaaaaaaaaaaaaaaaaaccttcaagatttaagtccaaaaggcgtctagaaggggagggaacttagaataggctcagggtgtaaccccagcacaggtaagaatagacaacttgcacaacaaggggagtgacatggagactctgttcagcagaacaaagaagggtgccaaaatgtgtcttctagaagtctccctctccctctctctccctctccctctccctctctctctctctctctctctctctctctaaacagaatttcatgtaacccaggttggctctgaacaacccccttccccctgcctccctagctctgggattataggccttcatcactatgtccagcaatcctaagagccttgataaacatccaggcggacaggcagtattaacgacagaacttcagcattataccctcacagatcctactataaacgcaattcacccatccttccaatgtgtacattaactaggaacctgtcatgtactcagaactctgttagtccttagggacagctgccctcaacagtggtcggtctcggctgttgaggctggcctgtaacgcacagattttgacctctttattctccaaagccaacaagtctcagggcaagggacagcatgcctcctgtcctcgggatctgtccctgtaaactggacctatcacctgtcacagatgatcacacctgcccactcggcagaaatcttgcgcggagatacaagtcctgcacagctcaaataatctgtgcaaaaaaaaaatcctcaggagttgatgctacagggttcaacttatagatagggaaactgaggctcagagaggcgaagcaaatggtacctacgcggctcagacttcggagtaaccccaggacactacatgtcaagcatggatagaattgggagtgcgggactaagagaaaaccagctaattgttttaaccaagaagggttccgacagctgtctcagcttctttgtggtgcagctgtgaaagttggggacagcagagggggctgatcggataggggcgaggagtttccacctgtgctggggggtggagtctacccactagaggcacaaccccacaccggcaggctgacctgtcccacggtccccgtgctgaccttagcgggtgggttggatgcagggacgaaccgcccctttgggctgaattcccagtatcggccctctccctccagcgtgggcagtgggcaaggacgcagtggcccccagcagcgcgcagacccacgtgtccggcgcgggcaggcgggcgagtcgggacggactgcatccttccaggcgcccgagggaggcgcgcggctgggacgcacgtcgggcggtgcccccaccctgtactcccctcccctcacccggcctccgcgcccactacctgcggctggttcccaggcgctgccacactcctctgcaggacgctgcccgccgggggcccttgcgacatgccgcgcgctcaccacacggggcgccctgaacgcggggttctgctacccgcgctccgcccgcatccccgcacctgccgccccgccccaccccgctgcttcccgctctcccggctcggctcgcccgctcgcccgcctccccgccccgcgcgtcccgtccggtcctgtcccgtccggtccccgccccctgctcccaccccgccccgcttcctcctctccccgccttctcgccacacctcacctcggggtccaggatcccacctaagtcactgttttccgctaggggccctgtgcttcgtggaagtcacgtggcagccccgaagcccacccactgggggagaggcccggtgggtggggacggggtgctggcccggcacagccttcggggtcctccagccactctcaaggagctcgggtgagaagcacccgaggcttgggttggtggcttccctgtcccagcgcgggtcgccggcaatgggggactctcttccgggagaggctgcagctggaccacgctcactccccctgcagcccagaggcgccagggggcagcgggcgggcgccctcgggcttctctaccagggcgtcgtccggtccggcgggaggaaggggcagggagggggcggggtgactccgagggtgaactctgatgggggggcggggggagggcaagaggaggctgtgagcagaaaccacgaaaggcgtccgtgtctgccacgctagacgtccgccgtcgtcactcattcggggatctgggcagagcactctaaggttccgtggaccagtttgcttcttcaagattaaggtggcacctggctaaggactgagacatgcggctgcagtgctcctgccagaccatgtagaggcagagcgcccccttcacctgcctggcagttttaaaattgcgaagtcaagatgaccgtgcccagcaaagaaaaacaaaaaaacaaaaaacaaaaactagcggttgcaggtttgtggtgtgcacacaggggacgatagctaaccatgagctggggaggcgggtgggaaccagacaagaggggccttcctggggttttcgttttggccttctggtctctgggcagtatgggaggtggcctttctgagtcccaaccccgtgtgcacggctctcttccaggatttaagaggggagcttgttgaacctggctgcctggcttcaggcacaagaggagtcggggtgtctaagtgtcagtaggttggagggtggacagtgtctacgtgcctcaaccaaccaaccggcagagcctttccatactgggtgttctgcgtatatttcagttttgacccccttccatcaacaacattgtgtgtgtgagagagagagacagagagacagagagagacagagaaagacagagacaattatatctcacacagtatacagagtacccagcatagcaccctgaacttggtgtggagcggcccaggacctctgttcttgaaaattgaaatgactctattaattgaatgcaataacaagctgcttagatgattggaagtcccgtcggcagttctctcctgctgttctctttaggacccttgtcttctgttgcgtgccctctgatggcctttctcaggggacagccctgtgggcttctggggaggctaggggagagaaccccaggatagagaccgctgcattcaccgaagactagccactgtggaatactttccatgtggtctgcttcatgatggcgtagaaaagcaagggctggaagaaagcgggccctgggagagtgtgtgcgtggtgtgtgtggtgtgtggtgtgtgtgtgtgtgtgtgtgtgtgtgtgtgtgtgtgtgtgtgtgtgtgtgtgtgtgtgtgtgtggtgtgtgtgtgtgtgtgtgtgtgtgtgtgtgtgtgtgtgtttaaatggagatcaaacaagtctcctctgcaggcctgtggggacacctggaggatgtggtccacgctgcatcaacacagaagcaaaggtctgtggaagtgcctgaccattcaagaaactgcaagagatcctgggtctgagcagagaggtgtggcatgatctgacttaagttgtcatgggctcctgttggtcacctcacaaaacagtagcaccaagtggagacccagcatccaaaacaggagcctgtgggtgcccttccaagcgggaacagtaacatttgcaatggatatttaaatcttaggagcaaattgaaagcaacaaaaagagacacaggaggtaaagaccatgatccaagaaagctgggcagggctgggaagatggtggaggccaaggccaggctgcagggagcgtgttgaatggaaggttcacagtgtctcactaccataccctcctgacccagagtgggccttgcccgtgtttacctggtgagtgtgtaatcatgaatgcattggttacttttgctacacattgaacaatatgcctgtcaggacgaccaagggggcccagggagctcgctgggggttacagtgaaatggaggggaaccgtgaaactagagttcagattcccagaatccttataaattcactataggtgtggtggcctacctggtggtccagctttcggaggcagagacggggtagggtgggggtgtccccagagcaagcaggctagtgagaccagcctcaggccttcacatgcacccacacgggtgcccccacacgtgcaaacatacataaacacacacgcatgcacaccgcaaacacagaccagaaaatggaataaggaaaggagggaaaagtaagggagaaaatccttgctttggtctctgagcctcagccgttcctgtcagtcctgccacggaagacgcagaacagtttgtgcagcagactgttcattcactgcccacctactggacagtacgcagagaaccacccgaacttagggcggggtgggacacagctttccaaggcctggccctagagactcagtccccccagggtgaccctaccttctaaaagtttcatagcgtctcaacatagcgccacctactgggaaaatcactcagaacaggagcccatggggaccatttccaatggttaacatatctgcaaaaatgagatgtttaagacacaaatgggttaagaccattgtctcttttcaactcatcattccttagccccctagagccaatctgtgttgaggtgactgcaagaatttgcgggaccccagacaaggaaggcttagccagggaagcacatacatggagacctacataagtgatttacagacacttttgtacagagacaggttttttttctgcatgacctccaggaatatttccactgtcctctgtgttgaactgtgcaacagcatatgttctactgagataaaaacacctcccacacatcccagcaccagaatcatgtgggtggtggaggggaagtcagatttgcaccaaacgccccaagcatgcagcctgaaaattctgtgtcatcaaacagaaaatggtaagcatcagagtcccttcttgtttataactcttcaaaacaaagcttgctctttcgggactttaatacaaacagcacacatgaatgtaaagtacctcctggcctttttgtgtgtttcttgttaacatgtgtgacactttccacaaagcttgaatatagcttaactgttttttaattactattttaagtgtatgagtgttttgcctgcatgtatgtctgtgaatggtgcctgtggagcccagaacagctccatctgaacctggagttacagatggttgtgagccaccatgtgggtgctgggaatcaaacctgcccctctgggaaaccagccggtgctcttgactgcctagtcatctctcaagccccttgagtatggcattttaactgttacttggaaatacactagaatatttcagtaaacaagttaacagaggtagactcctgacttgtcgtccatttgtgaaggagatggcacgcgtccctctaaattgtttacatgggaaagaactggaaaaaaattaaaatgcgtgaaaccaagggaacgcagagaagggtaacttcagggaactataatcagtagaaatgtcatacccataggccagttttgagaaatctcaggttatgcaagagacaacagctcatgtagagaagatcaatgctgattggactgttggatgggcctgacacgaggaagagtgggctgcaaaacaaaagcacttacagcccctgctgttacctgcaaccctcacaggagtgaggacaacacccagcttgtaagccactgtcccagggacaccaatgactaattaactaaacatcagttctaagaatttcaacatgaaccacaggaaaagaaaccatgaaatatcctgaaaattacagcttaggtatttcaaaaaaaaaaaaaaattaacagggacttttccaagtctgccaactcttaaaagttacatgatgttaccccgcccccacatgacattaccccggagtgacattaccccccaatgtaaggattcaggcattatgctggcctgcccctgtcacctggcagaatgtactcaggcagtaccctggtcagcccagagttccatgattgcttagtctgcaacgcaggtgcaaaggacccctttaaaagaaagcccccacccctccccacttctgttctcttttcctctctctttcctgatgttcccctggggcagacaggacttatcctgtctccctcttttcttctatcctctctgtgtctctttacctctttttttctttcctttccccgtttccctttctaataaaacttcccactaagctctgtctgcctggcgtgtttgtcacctgcctcggtcacgctcacctgacatggaatccataaagtttccacacatattatcataacaccctacacatgacatgacacacacaccttatggggcataaaaaattagctggatatttcttaaattatcatgcaattacatgggctgaattatctttttagtctctgtggaataaggcattatagagccattgtatgaagaaacaaagcaactagttagaaatggataaggagtaatcatctcagaaataccagaaagttattaaatacacagagttttctagactttagggatttgtcatctctttaaatttatgatgagctctgccttatttatttttatcttctataaagaaattttagactggttttgcttgcaccatgtgcatacctggtggtcagaagtgggtgtcagatcccctgggactggagttacagacggttgtgagctgccgtgtgggtcctgggaattgaacccaggtcctctgaacaagcagccggtgctcttaaccactgagccactgtctctccagcagtctgtcagttgagctctgtctgcatccttgccgcttctgttgtcctgccaatcatgtctatctttcttttctagtaaactcaaatttcattcatctatggtcttaatttgcttttccttgcattttagcgagattggccatgaaatttaacattctctttccttcctggttgtgcttcttcaaacatgtagctgaaacttctcccagtgtccagtgctacatgagtatatgtgtgctcacatgctgtgtgttcacatatgtgtgagcgtatatgttcatgtgctgtgtgttcacatgcgtgtgagcatatgtgtgctcacgcactgtgtgctcacatgcgtgcactgcatgtgggagccagaggtgaacctcacatgtcatttctcaggtatcttccaccttgttttttgaggcagacttgtcagtttcctggaactcaccaagtaggcggctgtctggccagtgagccctgggatcctcctgtctcaaactccttggtcatggaatgacaaatttaagccatcctggctgtttaagtgggtgctagggatcaaactctttcttgcaaggcaagcatttacccgactaaggcacctccccagccactgttactcagatttaatccttttaaaagaactgtttcagttttgctttgtggcttgtttccacgggggcctctgcggatgcgttccagctcggaagtccagactgtgtctctgagcagccctcctgcatgtctcactctgtcacagtgctagtacaattgacacacatgtaggtaaaagccttcattcctgactggcacggttttaagcgtccagggcctctgcggtctacctagttcatctgtgtccaggtccactgtgcgccagttcacagcgctgatgctgcagtttttcgtgattatttttggcccccatgctcttcaaatgcatttcctcttactctcccctccgcggaggcagaaaggcactgggccctcagtctgccaagaaccgcccaggcttgggcactccaccaaggtctatccttagtgcttgagccctgttttccaggtttgtttttgtcactctgaggcatccgtaagtggcctgtttttcctaataatcacttcctgggcttatctgaaattggtctctctgaaagccaggagcggcatgcaatgacttgggggcgggtgtcctgagctgactttatgctcgccttctctgacctggcttgggatcatcttgtggccggttcttgctaagccttacagcctgtgactgaagcatgaccttcctaataagagccatagagaaccacacaggcagttcccagaactggccagtttctcagtgaatgggagatcgagaaggaaaaacagtgtagatttcctgttaccaaccagggctcctcccagccgtcctggaaagcctagttacaaagaacaggccagggcccagagactcctggaatgggtgcccaacaagggacatgtctggggaccacattcttagacagctctggccaccagctgggaaaaggcttagcctagtgtcctaattacctctctgttgctctgataaaaccctgaccaaaagcaacttgggggagagcgttgacttcttctaacattttgtaagtccattgttgaggaagccaaggcaggaacctgggagcctgaactttagcagagaccatgaggaacactgcttactggctcgctcaacctgctttcttgtagcacccagggataacaccacccacagtgagctgggtcctcccatcaatcattaagaagatgccctgcaggtttgcccacaggcctatccgatgagagcagtccctcagcagaaggtccccctccgcaagtgactctagtttgccacaggctgccgaggaccaagccgcacggctgccaggctctcctctctaggttcagtcccccagcacagtacaagccagctgtggtgcagccctgcctgccatcatgacaagggttccagggtcattctcagctacacagaggcccaggccagcctggggtacatgatttaaccccgcccacctccaccccaaagaagctctggtttcttaggggtggcttgggagctccaggaggctgaagctcatttgcttcctcattctttgcaaccacttctaaatggagtgccactgggtaccagagaagccgaaagacagcctcggctactctgggcctcaaactgaatgctgctgcagcagctggcaggctgtgtgcacaggccctggaggtgctggcactgtggatggtgaggtgcttgaagctgcagaacatttagagaaagtgcctcaatggttcttgcaaatgtttgcccgaagtggccttccattcttgtgggaagggggcttgttcatcgtctcttatgtctggctcttgggtctctggattttgacttcactgttttactctatctagcttgtacccacagtgagtgtcgtgttcccccattattcaagaggatcttgaaaccaccgcttctaggaaggacgtcctccttgaccaagctcagtaggggaccttctaggccttgtatgtgaccaacccctcctagagcttcccctttgtttccacagaatataaattctgtggtttacctattagctccttgtgtctcaaatggattgcaaaaaggccctaatcatagacaatggccttctcagaggtgggatggcatctaactggttatgggatgaccccaacatagaccagcaaggctgctgctgcagacgtgacttcacagatagctgcagacactttgctcctcaagcctgaactgcgtttccagcggatggctgcttacacacacacacacacacacacacacactcacacacacacacacagcgtttcaccgtgcggttcactaagtgctcgaggatcagtgggagcaatgcgttaagggcgggggagggagtctcagtgagattttgagggttttctttgtggtttgttattttgagacgaagtctcactaggtagcacaggctggccttaaacttctgacctccttgccttagcctcctgggtgctggaagtcatgcaaccgaatgaagggattgcaggggttaatttgacttttttaagttttatttttattttatgtacacgggtgttttgcctgcatgtctgtatgtgtaccacatgcgtgcctggtgcctgcagaggccagaagagggtactggatcccctggaactgaagtttcagacagttgtgatgcagggaattgaacccaggtcctctggaagagcagtgagtgctttaactactgaaacgtctcgctggtcctcgtctctaggtgtgtttgaggctgttgtagaggaccatgaatctggtggccacagtgagccacttctcagtatccatatctttgtgtatttccctgccagctgtgaagtattagtttaagatgtgtttgttacattagtttatgctgtggagtatttgcttaatgatgtgttgcattcttttatgttgcatttgtttaactctgtaaagctgtgttactttgcctgtctaaaacacctgattgagctagtaaagacttgaagggccaacagctcggcaggagaaaggatatgtggggccggcaggcagagagaataaataggagaaatctagggaagagtgtgaggagcaagaaaaggagaagaggaggactccaggggccagccacccagccacacggctggccacagagtaagaaggaaagaaagatatatagaataaagaaagtaaaaagcctgcaggcaaaacatagttaaagagaaacaggataatttaagttagaaaagctggttggaaacaaatcaaactaaggctggacattcataagtaagtataagtctccttgtatttatttgggagccgggtggtagtcccccaaagagtaaaaagaaagaaaaaagacccacccatctggcccaattttgagtctgggttggcctgtgatctgatcttttcctagaagaaaggagtggggctggagaaatggctcactagttagctgtgatcgcacaggacctgggttccattcccagcacccatagggaagtttgtaaccacctgtaaccccagttccaggggctgagacctctctcctggcctctgtggacactgcccacacatgctgcacatacattcatgtgggcaaaacacataaaaatataattttacaaatagacttgaattaaggagtcattagaaggccaccaggcgtgagtctttggtgtcagatgggactatagagataaggagtccgctctgcagaggcggggcacggtgggtgctcacactgctgaggtggaggagtccgctctgcagaggcggggcacggtgggtgctcacactgcatcttttccagggcctgtcccagttggccttaatcgttcctgagactgcccctggcagggttgggagggagcaggcttaacccagaaaatggacagaagtgagtataatgttctcaaagcatatacacttggaagcctggtaagacgtccactaaaatgatggttaaaaatttagtttctccgaagagaaaggatagtggattaaatgtgatgcttgtgccgttggtaaagtgtgatgacccagttgtctggaaatcgattcaaaaccttaaatcagttcagtgattcagagtttcttgtaactggtgtctgagtagtgagaaagaactgttcacatcctgtaacgaagccagcctggctttggtggctggtataaccctggccgaaaacagcagaacacgaacttgacctgttttaaacaactgtttccttttgaagatgccctactgcgttttattagccgtgcctgaatcccaggacatctagaaatgattcttgtcaccatatgttggtttgtgttgttgaaaacaagataaactgacaagaggctgtgaggaatactgaggacgtctgagaccagactattagctgagagcctcaggctggagccaggcctcactgggcctgctcagacatctgctgtacagcagcaaggggctcagcctctctcaactctgagtctttatcatgacagtgggggtgacactaccccacctcaggaggctgtgaggacaagaggagagcttagcacagggtggagggggggagagtgggacgacaacaagtgtgtgggaactactggcaccttgctgtccttcagtgaatacatggataatatagactagacaggagctcagtggcaggggcttgctctctccgtgtccccgagcccttggctttgatccctaacaccacaaaattgaagataagttttcaggtgtgtggtgatgagggactagacagatccctggtaggagttagacagaaagagggaccgccaatctgattaaagatggcaaatttctggcgccttcctcacactcctgaccaaaggcctggtgggcttttaccccatcagtgggctgcccctgccatagactggtccaaattggatcaggacatgtttacttcaaagtcaggggcctatcagcctctctatctttgttcatactgaccaacactaagttaggggatgaaggcccctcaaaacccctgaaaacccccagccttcaaggaaagactggatgtggggctcaggagcccctcttctacacagcaggtgtctttctctgtgtgccttgctgtgtgtgtgtcctctaaaaatagtctctctcccctggctgactccctgctgagatttccctgctgctacccgttattttccctgcattttaattctttaaccagcagagaaaactaacccagtctagaccccctgaacagaacaatggtgcaaaccttgaattctcagcactgagaggactcaggaaaaggatcaccaaaagttcaggtcagctcaggctacagaatgggactttgtttcctaaaaaaattaacaaaacaacaacccaaactaaaatggttataaaaatctatttttgtacaattttgagggtctggtggattctccccacatctgtattctcagctactgggtggggggggggggctgaggcaggaggatcgttggggccaaggagaccgagatcatcctcaggcttgggagtggtgcatgcatgtgacccctcgggaggctgagacaggaagatgtcaagtttgaggccagcctgagctgctgcttacacagtgctagcatctgaactcggggccatgagtggtctaggaagccctggtaccattgggctacacccccagccaggttcacactgtctgtcagtgacctcccctgcctagaatctctcattctttgaaccacattttattttgaacaaacaaaagtaaaacgaacaggtgacccagaggctagaatgagtctgtttgtataacacttaatttagatttcagagaagagtgaagagaaaggaatttcattaggaatggtgctctgtgaggattccgatactgggctgctatgttaagtggtctcctgaagcaccaggtgagatctctgtgggcggagccactttcacagatgacaccaggtgaagctggtcatggccccctgttgccttaccttgacaagccctgtgcggaccccagcacaggcctccagttcgaagccactggtgtctcaacgagggcaagccttgggtgctgcggttagtctgggaacatagagtccatcaccccaggcagagggctgtgtttgtttatgaatttaactgctttactgcagtttctagaaacagatgaggccatttcttgcaaatatttgattccacagaaattgccaaagcgtgagtttcactcccacgttccctcaggaggtcaaagtgcaggggactctgtcttcctgtttctctgagtctgctccccccatggggttctcagctacagctgatgtcctgacacaggagcacactggataaacagttgttgtctgcccaggtggagatctccacccaccccctagaactactgcggaatcactgagtatgtgaggagtaaaggaacacacatgaaaaaatgactacttaattcaaactttcattataaactttccaacgcagaaagaagttcatctagactcaacagttaatactttgtcacattagtcttatctattgggggcggggcacgacacacacagggtactgccaggccaccatgctcaatcctcttgcttctgcctcccaggttcttggattgtgggcatgagccacaaagcctgtctccttattcggtctttttaaattttcctgctgggtcacacatctgaatacatataaacctagacctgcactcatgtaaccacaatcccaccgtccagctgaaaaaggaaatctaggggctggggaatggctcagtgggtaaaagcacttacaaggcaagacctgagttgagatccccagcacccacataaaaaaccaggcgtgatcgtgggtgcctggtacccagctgtagggctagcgacggggatatgggagctcactggtcacctggccagccaagctgaaacacgacttcaggtttagtgagggacagtccaagtggagagagtggcagaggaaaatatttgatggcctactctgtctctacaagcctgcttgtaggcacctgcacccacacaatcgggcacatgcatgcaaacatatatacacaaacgcatgcacacacacctaacaattcttttataatatctagtatcttgccttttagaaacatggcttttaaacattgtttgggtgtgctggattggtcatggaggtggaggtcagagtccacacaggcagggtcccaattttggtgacttcccagtggtttgcttcagtcctgcccacctccacagtcccttgcaactgacaagttcatcttctgggatttcttttggcatggggtctcaaccttatattctctttctgggaactcactctgtagaccaggctggcctcaacctcatggagatctacctacctctgcctcccaagtgttgggattaaaggtgtgtgccactatgccttatcactaaagtcatcttttaaactccatccatgaacactcgtgccacagtcattaacggctgaggctgtgatggggccctgagaagctggatgtttcatgagtattgggggagacccgacaggcaatccaaggacagcgtgacagacttcttcctgaactccaggtgaatgtaccaacatttccaagcttttgaactttaacccccaagaacgccccagtggctatcaaaagggtcttcccttcatttctatacactggagtttaagaataaaatttattacaaaacagtcagtccagtggtggtgtcgcacgcctttaattctagcactcaggagacagagacaggcagatctgagtttgaagccagcctggtctccagagcaagttccaggacaggctccaaagctacacagagaaaccctgtcttgagagagaaaaaaaaaaagtcagggggaaaacaaagctccttagaaaccaaaattaaaattctcagtcaaaaaagatagtacaggaagagagagatggctgagcagttaagaacactggctgctcttccatattactcaggtcaggaccctgactcccacctggggaggctccaccaaactaactgcagctccaggaatctgatagccttttctggtgtgagagcactgtgctcacatgcacaaacccaaatatatgtaattccagagtctgcttttatggtgttcgtttttcctttttgcctgtgtgtgtgtgcgtgcgtgcgtgtgcgcgcgcgcgtgcgtaactgaagttcccagagaaaagccatgcttacatcgaacactccacagggctcactggtcagaacttcggtgactgtggagagctggaacactgcagatccagggccaacggtcttgggacgtgtcagctcctcacctctgtgtatgacctacagtgctggtgactgttagctaagtccttagggaatgcaaacggttatcagctctcaacccaaaaccaagaatgctatcggacggtataagaggcccatagcagaggcttccccacttggctgtagcctgtctacctcatgctttgggccatctgaaaagtgccttatttctgactttctccgttctgttactataaaagcgtcatgaaggtgttaacatgttggaatacagtacttggaccaacctgagtctccttctgggttatgctcactctcatttggttccacaataaacttttattccctttgagggaagagctgtgctttgtatgaataccccaactgtctcaggacacaggctccagaacctgtttcagtctttggctagtgtaatctgacagttcagtgcctactaactcctagcctcatggtctctcagtagaactgtccagactcttcactgaattcagatcaaccacactatataaacgttgtctcctatttgcaactgtgatgacatttctgtccttggataattagtcccttgcttttaatatatttgctacccaattagtgatctggctcaaggtgtggaagtctaagaccatggcagagaaagccatgtgcttgtcctcgcagggtgagaagcaggagggcagggggttgtgcagagaggaagccagagagtgaactggctggcaagtcaaacaacctgctcttacaagaactacactcatccctagataaaggtgaagtccccgtggcctaatgacctcctgaaagtccacccccacccccagcctatcatgctgggaccgggcaaccccacactcacaccacagcactggtctggcattgctctggtcatgtttctgtttgtctctgtgtgttctctgagacaagcgttgcctactccactgagtgaactgctcaacggcttgactatatgcaccaaaaagccaacacaaccactgactgcaaaaaacattttatggctgggcatggttggcacacgcctttaatcccagcccttgggagacaagatggatctctgagagttcaaggatttgagggcagcctgatctacacagtaagttgcagaccaagactacatagtaagaccatctcaaaaatgaataaagcgtgtgtatgtgtgtgggggggccgggaggggcagcacacttgatacatggtacacacgtggaggtcagaggacaacttgagggagtcggctctctccctccaccatgtgatcctggagatcaaatccaggccaccaggtttgctggcaggtgccctcacctgctgatccatctcacagccctcaactgttgacattaagaatctgcagtctccttggggctctctcttcccagggtctagacggtctgtatgagtctgtgaaccacatgtgtgcagtgcccaagaaggccagaagagggcgtcagattccctgggctggagttacagatggctgtgagtcactgtgtagactctaggaaccacgcctgggtcctctacaagagcagccagtgctcttaactgctgagtcatctctccagccctcacagagaattttaagaccttctccaattcagtctcccttttccaatagagagagagaaaattttcagttttttcccttcggctctctctctctttgcttccatactctcatcttgctagcccatggcctaagaagccacagctccccgtgacagcctactcagcactgctcttctacactgctgggcctgcagggtagagctagctccttgagacttcacgcctcacttgtctggctgtttcataacaaaacaaacgaaatatacatataaaatttctaggcccaaagtaactgttatatcaaagaggttcaatgccatcaacacttcttatacacctgcttaacctattaatctgtcccttctctttgcttaaatacttaagagcaagtccaagatataacatcatttaactctatcagcatgcatcccttaaactcaacaaaaatgcaattagaattaacatttcattttttatttgggggccttttttacatattctacagtgtagttttatacaatatcacaaattacactttgtcttacaaaggctaacagtgggttgttttcacaagaattaagtgcagccctcacaaacagcacttcccagagtggtggggaagctgcaatgatcacaccaccttaagctgtcagacccctctccactcagcaggcttttctgcctcggtatccctggtcttgaagcagatggggtgtgtcagccatccagggcatgtgcagcctctattcactgacgacagcagtaccctccacacacacaagcagctcaagttacaacgggcaaaaaacatcttcacctttaccaaaggtccccctggaagataacctcgcagtgagaactgttataagtgggcctcaagtatccttggagttcccagtcacttggcttctgcactggggactgaatgactctcaaaggtcagtgttaagtgagtcaagtcacatgccagacaaaggtaatcactccaaactcctcttgatgccatcccagatcctgagtgtggaaagggacccttttaggacatggcattgtcaagcccagcagagccaccaagtgggatcctccaagtcgctgatagaacacttgctcatggcaacctactacactgccccattgcctggtgtctgtcctagccttgcctgcttgggcacttccgaagtgaaatccatcacagaacataagtgccataagaagcacacaacagcagccaccttctgaagtcgcaaagtgattttaaggcaaaggtcagttcactgtgaaatgcagagggctgacctgctgtcctactaacgtcggtaccaagaatgccttgttagcaggagaaagcactgtgtcaagaatttggtctttacagcatcttatcttaaaatacaaaacattgctctgtacgaatacattgatcccaaatttcaacactaaaacagaatatagaagttccatgaagtggcctcaccatgaagcttttccaaaggagaaaaccagacaaaggagaaaacctagatgcttatgatcattaagacataccgagcaagagcaatacagatcttctaagccattagtaaattcctctgaaaatggacaaaagtgtgtagtcaccaaacaaggaaataggtgacaagccagaggccctatctacaatgtaccacgtaagagacaaagtgcaagctgtaagaggctgtggctgagtctcagagtgtaagtttgctgagacccttttaagtctgacactatagcgcctatacaaatgtccttttccagagcagttcactctgcttaggtctgctgtaaaatgactcaccagtaatcctaatatatactctgaactggaagaatctatttggaaatgaaggctttaaaagaaactatcagttcccactcaaattatgttcaaagacctatgaagatgaaagcacaagcaagaagcagagctccagcctcaggtcttctttagagcaatatttcctgcacaataaataacagccttctcctttatctcacaaaacaaaaccctaacactaaattaagcgcccttcgtctgtgtgttcatccgatgaactgcactagcaatgcacagctgctgtgcagagcagagccaaggccagtcaaagatccacctcagggcttcacatgtggagaaagctgccatcaagaacccctcagagcacatccctgggatacctcgacagccgcaaggcaacagggactgatggcatctgaggacacatacagctctgtgccatgctcaaaaggctttcacctaccacagagggagatcagggtggcagagaatgacaccataggccagtccaggcagaacagtgcactgcacctgtgcagagtcacggtgactttaaatgaggtctcccaagcagcaggcagtgacctgagtgctgacaggactgacctccaattccccaacaaacagtttatgtgtcaagattaattctctttggccgaagagggtagcgccgtctctgggagcagtcaggggcatgctttctctttagcactatgttcgatgtgctcctggctgcagtttcggttggtgtggtttccacttgtgttatagacttgctgggcttggtatcagctctcctgtaacagctggaaaagacttcctggttgatcctctgcagttggatgacaggctgcatctttaagacctgggaaaagccttctccttgttcaattaacacaggcaaagccttgggaaggaaaaagctcaggttgaaaggtgaacacacagacacagccacactacacacacatggatacgtagcattgtaattcttttttttttttaatattttatttatttattgtatacaacattctgcttccatgtatatctgcacaccagaagagggcaccagatcccataatggatgattgtgagccaccatgtggttgctgggaattgaactcaggacctctggaagagcagtcagtgttcttaacctgtgagccatctctccagccccagcattctttaagtcaagtgtattactgagacctgatttcttggtgacatgtttatttgactttatattttaaaatgcccatttaaatggaggaattaaacttaaagctaagactaaaagatacacacacacacactaaattttggggataagactggtggtggtggtgcactgacagaatgaacttaacctgttagagacctgagcatcctcctacagctgcaaacatgcctggcgcccaccaacaccagtcttttcctactctatatgcctagcacagcttttaccttcatggcaccactgatttacagcttttaccttcatggcgtcactgatttccttagctatagcgtccccgcgacatttcagattttccacatgagaagctgcaagaaaccaccaaacagtattttagcttctttatctcattagccaaccgtaaagacgtttagatgcaatccagacagaaatctgttaggaccattcaccttagactaatctttcttacagtactttgtaatctactaaagacaacgtcctatccaatttatcaagatgagtaagaggaccaggaggtcagcagagtgcaattcaaaggtgtgcacacaggtggggtgctgagcagcccccgctgtgccccaggagcatccagcctctgttctataaacattcttgcagctgacacctccacacatcatcaagttttaagacaaacacaggctaagactttaaatgattgtgaattttacaaaagcaaaacatgggccagtgagataactcagcaaagtgcttgcaaaggggttggctgacagttcagtcctagagcggaggcaaggcagggaaccctgcaggagggatccccgcttcacaaagctgtgttctgaccatcacgtgcatcctgcactgcctgctgctgaggcattccttccctggtggagaacctccgtctctagtatttcaatgtagactgaagaccaacagctcatccctgggactccagcaccagactggaaactgactcaaaagctaccttggcctttgctcaggagacagccaaagatgaactacctggactgtagcccgtaggccactctataatactctgtctctctctcaaattcatttcatcggttgtatctttagagaaccctaacacagcaaaaagcattcgtatccttgtgtgcatcagccatggtcacatgatccaaaagagccccactccagtgcgcacagtcctttccctctgcaggactaggcacttagtgtgccgcttccacaggactactacaaacaattcctaaaatacctcataccaccgtttttggtctttatcttccccttgctaaacaatacctatttttcatgtacaaacaatgaaaacctataagcccaagagtgacatgggcttgtgtataaaatggagctgggctctaggctttcatacttatagattatcacacccaggtgtgtgatggggtattctaaaataagacattcagtatttctggcaaaactataaatcccttttacaaactacagcatcccttactcacacacatccaacaactttttccgaagggccactagagggcagcgtgcacaccaatgagcagtcgagcctctcctgggagggctggctgtctctaagcatgggatcttcagtggtgatcacaggtactcaaaagctaggacagggcacaacacagtcatgctgtcaggcacttcctaatgaaagagggtgctgtcagctcacacagggactatgttatggacagcttgccttaaacagagatctggtgccaaatggactgaggagtacaggatcggaggcagtggataggatacactatacccaaataaagaaacagatcaaaaacagtaggcgagggcaactgaagactagtataggaaaaggaaggtgactggaggacagcctccagtgtccacacacccaggactggaggacagccttcagtgtctacacacccaggactggaggacagcctccagtgtctacacacccaggactggaggacagcctccagtgtccacacacccaggactggaggacagcctccagtgtccacacacccaggactggaggacagcctccagtgtctacacacccaggactggaggacagcctccagtgtctacacacccaggactggaggacagcctccagtgtctacacacccaggactggaggacagtctccagtgtctacacacccaggactggaggatagtctccagtgtctacacacccaggactggaggatagtctccagtgtctacacacccaggactggaggacagtcttcagtgtctacacacccaggactggaggacagtcttcagtgtctacacacccaggactggaggacagtctccagtgtctacacacccaggactggaggacagtctccagtgtctacacacccaggactggaggacagtctccagtgtctacacacccaggactggaggacagcctccagtgtctacacacccaggactggaggatagtctccagtgtctacacacccaggactggaggacagtctccagtgtctacacacccaggactggaggacagtctccagtgtctacacacccaggactggaggacagcctccagtgtctacacacccaggactggaggacagcctccagtgtctacacacccaggactggaggacagcctccagtgtctacacacccaggactggaggacagcctccagtgtctacacacccaggactggaggacagtctccagtgtctacacacccaggactggaggatagtctccagtgtctacacacccaggactggaggacagcctccagtgtctacacacccaggactggaggacagcctccagtgtctacacacccaggactggaggacagtctccagtgtctacacacccaggactggaggatagtctccagtgtctacacacccaggactggaagacagcctccagtgtctacacacccaggactggaggatagtctccagtgtctacacacccaggactggtgggtagcctccagtgtctacacacccaggaatttacaagtctgggagaaaaccagagagaagcaactgtcaggggctacggtgacaatgctcacactgaaggatgtgtatgtacatagttgcagtgacaatgctcacactgaaggatgtatacatagctgcagtgacaatgctcacactgaaggatgtgtacacagtgtaaggtctaaggacccaacaccagactgatgtttttccacaggaatgagaaagatcaaaagtgaagctagtgggcagccgggcatggtggcacacgcctttaatccctgcagctaggacacaggggcaggaggtctctgtgagttcgaggtcagctggtctacagagcaagttccaggaaagctgggactacatagagagaccctgtctcaaaaaaaaaaaaaaaaaaaaaaaaaaactaaactaaaacaaaacaaaacaaaaagtgactctggtaagtgcaacgagtcttctggggaacttgcctctgaaaggcaagcacccgggaagaaggacacaccccgaagcctcatctgctgcagccaccacacatcctgtcagtctcaggccatttcagagcaggcctcatggccacctttacaaataacccgagaaggggactgcaactggatagaattagagggcacatcttctagaatccaaagtaaccctgtcaaagaccactctgccagaaatcacacactgtcctcctaagatgtaaactcacagatagttctgaaaaactgagccccaggataatgaaactcctgaccattttaaaattaaatgtctaactatgaatttacagtacctcttcttttttaattaagtaaattgaagcctttgcatttaaaaggtatctgcagtgtgtggtggtgttcacctttaatccagcacttgggaggcagaggagataggtctctcaaaatgacctctaacagtcaggaaggagacagacacctgtgatctcagcacccggaaagcaacagcaagaggaccacacattacaggccatcctgtactaaacacaaagctgagcaaaactcataaagcatgtggatatgctgcatagacataaaaattattttctgggctggcaagatggtgcagcaggaaaaggcacttgctgccaagcctgacaatctgagttagattcctggaacccatgtggtggaaggggggagttgttctctgacctccatgcccaagctatagcacgcacgtatgtgtgcacaaacacacacaatggataaaaagttttagaaagttaaagacatcactttccaacataaatacctgaagaaattccaaagcaataagctttttgctcccttgctcacaaggattctaagtcaatctgtcatggtttataactagaacacagaaacactcctggcacacgaattctgtcttaggacctagtgctggtggctgacagtccatggtaagaagctgtgacggcctcccctagaagcgttctcatgcctcctcctcctcacgggccctacaagagcatcatcaggatggcaataagctttggaggctgtcctggaactagctcttgtagaccaggctggcctcgaactcacagagatcctcctgcctctgcctcccgagtgctgggattccactcttaacagtgccaacaaaagttcctgaaagaaccacacctcatagggagacttccaaagctgattaacttacttagtacaatggggaaaggatacaatgtttccagtccagagccacttatcccagctgtctttaccaagtgtgcctcctttgtaagtgacccaacaactttatcaccattagataaatccctggagatgtacacacagacctgtttctatccaccagaaagctgagccaccagcagacagcaccttaggccatctgtgacctgacacttccactggtgcattaaaaatgcagagctcatttatgatttctctattgttttgtaaaactccacaaaactgttgccacactgcaacatgaaatttgcaggaacctaaatctgtactccctggccatactatctctttccctctttaaactgaagttcgaatcccaggtgcaaatgtgaaccctgaagtgtacatccttgtgagtgctacccgcagattgtccagcagcgcccaaagccagacagcattgtcaggacacaagaggggctgcctgaaggctctgcttgcagggccagcttagaactcacgtgtcgactgtaggaggccctgagacatccctgccatcactacgtgtttaatgcagggtaacgggaaagaaccttttcattccagggctttacactgatgactactcaagggtgctcctgactaacgagaaccatgtcttactggtaaatagttaatcagtagatagctggggaaaagtttgcccttacaaaatgtggaagttcagagcctctgagaacacagcctcccctggctgcctgctttctaaaacagagggaaatgaaaaagtggaaatgaaaggttgagtaataagcctggttttgcttccgggtcactgcctgtctaaacaaaggaacatgaacccccaaagcctgcaaattcagcagaaatgcgccactggagagcttcccatgtgctcccaatgtatttcctgagcacgaacaagcaagcgtgctcaagggtaaccggcttgtctcagtttctaaggaggcagctgatgccagcgatgccgtgagttgatgaggattgagatcagcattcctgctgaaaataccaacaggttagagctatgagtccacacaactcactcctcttcagcactgtggtggcaatcatgttgtgggatattattttaagatgtgtttcatttgtttatgctgtggaacatgtaatgatgcaaagatgtgttgtattcttttatgctgcatttgtttaattctgtcaatctgtggttctatgcctgtctaaaacacctaataaataataataataataataataataaatagtaataataataataataaataatcagttctaataaagagctgaatggccaacagcaagaaaagagcaaggataggcggggctggcagacagagagaatacacagaaggagaaaaagagggtctgaggagcaagaaaatgagaggaggatgctgggggccagccacccagccacccggccacccggccaccccaccacccagtcagccacggaacaagagtgaaagcaatatacacagaactaagaaaaagaaaacacccgagacaaaaggtagatgggataacttaaggaaagctgtctagaaaaaaaccaatctaaggccggcatttatcagtaataataagcctctgtgtgtgatttatttgggagctgggttgcagggcccccgaaagagtcaaacagccaaaaaagtaaaaacaagcaagcaaaagcaagcaaacaaaacaaacaactacagtttcccctgggtctgtcaaaaaccctttttgtggtttttgtttgtttgtttgtttgtgttgttttttcctgaggcagggcttctctgtgtaactttggaatctgtcctggaacttacactatagaccaggctggtctcaaactcacagagatccacctgcttctgcctcctgagtgctgggataaaatgtgtgtgccaccaatgcccagccaggcccatcaaaatggacccagaggttttaatctggcctcagccaagtgtctgatcttatttgccaattcttttgtcccatggacttgggtttatttctcagtgctcgtcctcctgataggatcgatataaatgcccacctaccattgccacagaaacttcctctcacctgaacacactgttccaggttcatgctacccaccctctgagcacaatgctgcttctggagtcgtgaggcggctgacccctcagccatggcgacactggtaggacttctttaggataccgacctgcacagcctggccaggactgctgcactatgcagaccctggctagccaacagtagctacagatctgcctctctgaaaatggaaggaactgatgtgcaccagcagggtaggaagtggtatcatcagctcccttgtttaacaccaagggctgagacgagccttcctactctgaaacagggacaggaaaccaccaaccaacaagtgtatgtgaagctacatggtaagtgctacatggtgacatcgccaggcctgggcctgcaccgtgtgcccacccgtgactcatggtcagacccggtatctccagtatgacatgtgcccacagcctcttaagccatggccctggccttggactgctcgtgactaggtgaaggcagcacaaactagtagcaggagggagagactctgaagaggcaaaacaagcacaagtccagggaacgttcagtgaattcgggagggaggaacgtcctgcagaggtgatgcagcaaacacaccgtcccaagtcctaagagctaaagtcaatcaggcacacaccacagggctgacagacggctcctgagtaaagtgactatggagcacactgccaatccccagctaggcgcagcagtgcatgtctgcaaccccagggctgtcgaggcaggggcaggaggcaggggcaggaggcaggggcagctccctggccagcctgatggaaccaaggagctccccattcagttaaaggaatggcagggtaccagggagtggtaggcctgacaagggttgtaaaggactgtgatgcagggtaacatggacaatctctctagtgaggtgacagtgtgaacagagagctacgtgaagggagaggatcagataggtaactttagacaagaatgaaaggcaccggcccagtacatacctggtacagcctgaacacagagtgaaagttagagcactgtgagcaaggttacaggtgtggagcaccaggccaagcagagatctcacaaagctgaatggcacaagaactccatcctagtaaaccactatttacaaggaacaaggataggagctggagagatggctcagcagttaagagctccaactgctcttgcagagaacctgagttcaactcccagcactcacaatgggcagctgacagccacttctaactacagctttggggaatccaatgcctctagcctgttctggcacctgtattcatgcctaccaacatacctgtggtttaaaaataaaaatgttaaaaaaccttcctaaaaaatgataatgggttcaatatattcaacatgatgaaagcaaataaaatttaaaagcaaagatgaaatagaaactcagagctggcccccgacaacctttacctgagctgcctaaggaagtactagcaagaagcaagcccaaaaggcaggcaaaaagttaaaaataatagctatttcagaattttgaaaatttgattgataaatctaactaatcacaagtacaaaaaagaagctactgagccagacatggtggcttatacctgggattccagcactcaggaggtggagacaggaggatcatgagttccctgccctcaaaaaacaaaacaaacaaaacaaagccagctggggatgtagctcctggtcagcacttgtctggcaggggcagggtcctaagctccatcctcagcaggacaagagtcctagcaggtaaattttacctttcatttaaccaggaaaactaaaattgacgtgaaaaacacagaaaactgggagtgggggtgtccttattcaatgcacagagggtacaaaggtccatttcttgctcatggagtttaaaggactggataaagtcagataacttcactagagcagttacaattttataggagacattaaaggaacagaactacagaatgcctcttccaaattgagaaacaaaagtaagggcagaaaggatactgtatccgcacaacagaaggtagcaaaggcggggcttggtatgaaagagctgggactggaaactggaactatgcataaatctgaacataaagctggactggtcaactgtggccttcactgtgtttatgaaaaccgtgtctagccgggcgttagtggcgcaagcctttagtcccagcactcgggaggcagaggcaggcaaatctctgtgagtttgaggccagcctggtctacaagagcgaggtccaggacaggctccaaagtcacagaaaaactctgtctcgaaaacccccaaaacaaaaacagaaacaaaaaaaaacaactgtctacactaactcaagaagttatatataacacacattgtagaaaaccaggaagaccacattaaagataaaatctgaatcatgaaaacaaaaaaaaacaaaccaacaaaagaaacctacagcaaaactgaaagagaatggcgtttctgtcagtagagacacagccagcagctgtgcattgcagcctggagcatctaacatttgagattgtggggagggaaaactcgaggctgacagaatgacagagggtatcacagacatctaaagacaagcgctatgcatcgactgtggaggcgaggccgcgcacagctggggaccatgacaaaggatgcttcatttccaacacattctccaacagcttacctgggtcagggtcacatttcaggtccaagggatgcacaaccgggcgatactgcttctaaacagagcacaaatgaaagcatttaacttagacatgtgatgccgcagataataactccgtttgtagaccaggctggccttgaactcacatagatccctcctcctcctcttctcccccccccccatcgctgcctggctttgaataccttttatatactgccccctggtgaatacagtaggaaatagcactattataatcagaaaaaaagaagtcaaggcatagtggtgtttaacatataaggcaatgaccaaagtatgatggaagttcattcaggacaaatgtttgaaactcaggattgcaattttcacaggatcttttacaaaagtggctaaactacacaccagcccattactgtccacacctgcagcagcacacaacacagctggctcccccacagtcaggcaaaaggaaaaggaaatgttccttactactcttgctcaatgataaccagagccaaagtgtaaaaaaggaggagggacaactaatgctctccagttttctctctctaccctcactgactagtttcagggtttcctttaggaagtcagggaggtgaggaaggaagcatggcacagtcaatacacaccaggcatttttcctttctaaggacgaacaccgtgagaaacacaaaaaattctcatgaattttcctttccctactgtgataggactttgaatatttagagcgactgcagacctttaatgccctgaaacacggctgaaggagggacgactgaaggttcacatttaaaagcatgctgatttaaaaaaaaaaaaaaacctaaaggcatagaggattgtacaatctaaagcctccatagtcattaagaggggcaatgccacccccagccaatgtcaacacccagaaagagacccgggtctaatctgccagggctggcttcatttccatttgtcccagacaagcatgtgactggcatggtgactgacacctacagaaaacaaagcctaaggctctgcccatctgaaatgccaagccagccactgtgatagtgtggcagaatattagtttaaggtgtgtgtgtgactttcgtttatgctgcatttgtttaactctgtgaagctgtgattctttgcccgcctaaaacacctgatgttctaataaagagctgaatggccaataacaaggcaggagcaaggatggacggagctggcaggcagagaggataaacagaaggagaaaagaggaaggagcagcagcaagagaacaaggagaggaggatgctaagggccagccatcccgccagccacggagaaggaaagtaagaaacacaaaaggcactcgggaggcagaggcaggcggatctctgtgaattcgagaccagcctggtctacaagagcgagttccaggacagcctccaaagctacagagaaaccctgtctcgaaaaaccaaaataaataaataataaatggagatgtaattgacatttaaaaaaaaaaaaaaagcccagagggaaaaggtagacaggtcaatttaaaaacaacaacaaaaaaagctggatagcgccaagctaaggccagacatttggaagtaataataagactccatgtatgattttggggggggggggctgggtggcaggcccctcataaaggtcaaagagccaaaagagcaaaacatcacacaacatggtagtacaaactgtaatcccagcactcaggatgaaggttggaagggcaaaagtttgaggtgagcctgcactatttggaggtaatgtaagtgtgaggatttaaatgtaatcatctcaccagagtctcgtgctgagctttcaaggttttgatgacgctctccaggatccttctggggtactgcctgcgttttgttgccacatctactatgagctcatcaaattcatcttcaagaactttgatgtcagagtctacttcagaaaaggtccatgttagtatagaaacattatacagctcaattcacaaaataactaaagaaaacagtgtggcaaactaacgaagccccctcattcctgtaccagtcagttatcaaacacctccgtgaactacaaagacaagcagagcatgaccccaaggggccggcaactgtaacctgacaaacgcagcagggacataaagacagaggacacacaacaaggaaacaccgccggtgggagtgaatgactgaacagaaacaacatctgagcttgaaatccaggtgtaaacaaggcaccgaatgagaagggccagggaggaaaacacctctggggaagggaactgtaaggacacggagtcgttgcagacagagcatcctacatgggttaactgcaggggaaagggctgaggtgcagctcagctgcagagcatgggcttacagctcgcagggccctgggtccagccctgcatcctcttccccgcaattgttaactataaagggcatctcataccatggacaagctttcactttattttgtgccaacccaccctgtgacaacagcagtgagaagaatgccagatgtgacatctgactcaggggtgagggcatgaaaggtatggtgacttggggacaaatgttttaccagctctttactgtaagaaaatggttctcaagttcaagaaggaatgattacctggggagtgtgttaccagtgtgtaaatctggactcacaaggtctaggatagggcacagaaatgaagcaccctgaagaagtgagtgcagagagacgcactgggcctcatctaaaaaaataacttcagagtaaaaaccctggttggagaaggcagcactgtgagggatctgcactgaatcccagtactgaaagcaaacaactaagaagcacaacgctaaggacccaagtctcggttagatggcttgcaccctgagctctgttatgccggtctagtctcattgactaaagctttaccagggagaagcctgactggcacctgtttctgaaatgttcggcaagctgtctggtgtatgtctgcatacgtacgtcacttctacacttcgaagtatagtaggtgtggcctctcactcctgtaacaaacctagtccactcagggcttctctggaggacctgaggaacatgtctcacttggaacacttagtgaaataagcagctttaaattttattacatccttttgaaaagcagtcactggcctgcaaagaacagggcacgattttataaaagttctttttagaaacttatgtgtgtgtgatggggatggcacacatgccacagcctaactcgaaggaatcggttcttgccttccacctgcacccaggtttgcacagcaagcacctttctcagctcagccatctcatcagtcagggaaatcttctatgtaggaaaatggtttcctagcgccctcaaggggtagaatttgtaaaaccacaatgtacaaacaaatgggtgtctatttctaaaagcagacttctgctctcaaggagctgcccttataaagactggggtatacagcacagacacaagacctacctgacataagtgagtccgtaggctcgttcaccagcactgaacacacacacacacacacacacacacacacacacacacaccactcctgtgattcctccaagaccacgtggtaaagtacaaatcccttacaacttacctttcttgacacatttgctattgtttttcccaactcactactggctttccaaacatttcactcctttgtgactttttgtatgctttgtttcaaataaacacccattgaaaacctattcggtgtgcaaagtacttctagctaattttttttccggagctgaggaacaaacccagggcctttagcgctctaccactgagagcgctaaatccccaaccccagctaatttttttaaaaaaatatatcccctactaatcaccaattattgggttaatattttacaaaacagatgctgttggtttttatccatttaatgtgtaaacccaaaatatgttttggtaattttaaaagacagtgatatagaagccagtgagatggctaacatggtcccaggtaacagacaagaaagtcttctgggcaaagcactctcttactgtgtagaagaaacgttatagtcactagagttgctggtaggcctgtaatcagctcaaatgactggacaatgtgaacccaaagcagtgagtgacatcagtgatgctcatccctgagtgatgttcccagagggacagatggcacactgcgcttctggagagttctgcagacacagggacacctgcctcacttcccaaacggaccactccctgtccactgatgtcccttcctacactgccctttcttccgttagcactttgccttctttagacatgccagcaccacgagtgaggcacagtcatgtctaagccagcactagcggcactcacttttgatcccagcacctgggaggcagaggcaggtggatctctgagtttgaggcaaacctggtctacagagttccaagatagccatggccacacagagaagccctatctcaaaaacaaacaaacaaaggtacaatcaagtctttggagtaagctaacagttttagaagccatctacaaatctgtaacaccctttgcaggatactcacagagtttaactttacacataagaacacttcattatccattctaagtgtcatctacgcactgcagaaacataaaccaggcttatgaggaaatgcaggggttttctgagcctatttctttaactggggataattctacaacatctctgacagccctactgcagaagcacccgaagagcagacgaaagacctttcaggacaccagacaccagacaggacagatcaaggtacccaccaagtttcttctgggctacgacttcagtaatctacactaatttcttttttcccataatactttaaatatgctttaagataaatgatatagaagccagtgagatggccaagcataaaaaaaaacgcctgccaccaaggacctgagtttgaccctgaagtcctcatggtgaaaagaaacaactcctgaaagtgtcctctgacctccactgacatgcacaactccctccaaaacaatgttcattaaagagagagtgtgtcttagtcagggttctattgctgtgaagagacaccatgactaaggcagctcttataagagaaggcatctaattaggggcttgtttagtttcaaaggcttagtccattatcatcttggcaaggagcatggggacatgcaagcaggcactgaagaagctgaacactacaagcagagagagaaaaatccacaagcacagggagagacagaatcctgatccacaagcagagagagagagaaagagagagagagagagagagagagagagagagagagagagaaaagacactgggcttggcatgggcttttggaacctcaagtccactcccagggacacacttcctccaacaaaggccacacctcctaatgcttctcaacagtgccacttcctggtgactatgaactcaaatacataaccctatggaggccattcctactcaaaccaccacagagagataagaaaacaaattataaaatagcattcaaaataaagttagctgcaaaaacaagctcagaaattaatgacagaggaagagtcaagccacatacccataagacagtggtcggcagcttcctgccaggcttgtccgttgatgctgacattctcctccacagcagattcaaaagtctgcaataaatttacagcagccacgtcagcagaagggagtctaaatcctgaattcaaacattttagtaagatagtaacggatctctgtggaacagaatggaaataatgaaacactgaggaaaaagataaagtccaagttaactgttaggagaggactaaatacccttaccacacattagtgactgcacaggttctatcagtgacaacttatcagaatggccacatagacaaaccagaacacagagtggtaaactgtaagactctaaagaaggtttaggctcaccacgtgctctccaaaatagtaagttatttccagaaggggttcagacagattcggaattcacggaggacctaataaatgctattttttgaaaatatttttaatgagcatgcctcttgtatcacttgtgtaattaaaaataaatatgaataaatgacttataattatgagtcatagtacagaccctatactagtatcttacaaaaagggctacaatacagctcagtggacaacactttactagtgtgagcaaggctctgcattcaatccccagcactaatggagaaaaggaagatttaataggataagattcttactgtgttaagctctcaaagattagatgagaataaaaactgtctttgaaatgatcactgcagcttcaccaaccattgatgaacatgctactatactattcagctttacttagaggcatatcaacattgtcaaggcttctcaacaaaccattacttttcattccctttccgatctcacccaacaggatataagaggttaagtcttataggtgttctaaattacttagcattttttctaggatcagacaaaccctcgtatttacagctgtctcccaaaataactactaaaaatgttgagatgttgccttgactccaaggagggaataacatagtagccaccgtatactgtacaccgaacacaaaacggcaacacagaattacaatctgagttgggtttcttcattatccttttacttaacctctgtctggtgcatgctacaaggacacttgccgctgagtacatctctggaccctcctaattctttttttttctttctttctgagactgataacctctatttttactcggcactgttgtcatccggtcacaaaggagctgcacgacaagcttgaacgcagtcccctacacacagactgtgcatctatctgttccagaggccgtgacccctcgacttctagttgtctctcctcagaaaccaccatcttcggggatttgcaaaaatacaggcgacaagggaagagggttacgaggccaacggggtagggcggggtcggggtgtgtctgcgcggccccagctggtctggaactcgggattcgcccgcctgtgcctcccggagcccggcggcggggggaggaggctcggcccgggcgatcgtacccactgcgcgtcccgcagcgccagctcccggacgtcgtcgggcagcgcggccccgagctcccgcacgaagcgcccgcacagccccatcacttccgccaccgcccgcttcagggtgcagcgcactcggaagtctgcgggggcgcgcccatcctggtcccgcgccggcgccggctccggctccggctccggctccgtctcacgaacacccgccatcgcgccggtttgaacggaggcgcgactctgagaccggaaggacgcgcccctcactggacgcgtccggccggaaactccgtctgccgcggcccatggttccgcccgggcttcggtgggcccaggaatgccacgcgggcttccggttgggaagcctgcagagatggctgtgggtgccgtgggcttggggctcgtggactgtcactgccatctctccgccccggagtttaacagcgtatgtgaggccgagtcgggggccccgggagtcgggagggccgcgtcctttcccggaagttaccctctctcccgcagatcctcaggccctagcgggtctgtgcggagccgaccggcttcccttcgaacccccgtcgtcgtcctgcctgttcctcccgatgtcagctggcggcacactgtggtcgccacagtcttacccctcctgagatgtgctgatcccggccagccctcagcagaggccccgggagaggggcaaacgcggagcacacggggtggggcctgtgcgagcggacagactcggagtttacccgctgcctcggggaggctggaggtggaggagcgcaggtctctatttcttaggaggcgacgcttacggtctgagtgcgcgttcgtcaggaacaccggcagacagtatggaatttggcctgttttagttcgatgcacatttttaacccattaaagttttaagacagcccatttaaaagaagaaaaacgatgtgccgaagacaaatttgctgctgtgtggcaaaaaggtgaaagagacaaagctaaaccacttaagaactcccagtaaacagacaggagatggtggaggccagtgctgtgatgataacatgagaaccagagtagatatcctcgacgtattttagaaataagtgcaataatacatgcaggagatttggatgtgaagaccagggggaaggaaggatttgaacatggtttggatttttagtttgtgtttaaggtggtgatgccctttgctgataccagggcagaccaggctgtgggataggaatggagagtcaggcagacagaatcgctagcagggacatactgatgagtctgatctcatccagatggaaagattacatggtgatttagaatgtgaggagtcgtgggttcaggagagagtgaaaactgaggtatctggagattcaacttgctttcttaaaccacgagaggctgagggcatagctcagtggcagagggctggcacggtgtgaccaagggtgctaaataaataaacaagacagatgagatctcttacaagtgcagagagatcagaagagctggaagtcacaaaaagggcaatcagtcaaggggactggagagtagctggcagtaagacagtgatgttgtaaaagcagtgtgtgtgtgtgtgtgtgtgtgtgtgtgtgtgtgtgcaggacgggggttgatggaggtgctttattttctgctacacagggtggcagaaacactgttgtgctccctggggccccagctgaatttatatgaccaacgatcagttaattactcattaaaataagtgtggtcccttatgtttgtcgtaggatctggatgaagtgttggagaaagccaagaaggtaagttagtttccattactgacccccttttcattcctctcctgtttttgattgacatactatttttaggtaccgtttagacatgctctgagtttccatggtctatgccagccgcagagctaagcccttattaaggccagctcattttaagtctcaacacccccttaggaagttactatttcatagtcctgctttctccatttgacagatgagggttctaatgtctaaaggttagtggcaggccagagacacttgccagagaagtgatagagatacaatagtctgatttgaaagcgttcctacagccactatgcttggcggcaccgtagaatggggcagtcagtctctctcttcctaaactcacctacgaaagtgtactgaaacattttgagttgttaggaaaaagttagcaagggctggagagatggctgacgggataaaagcacttgcaaacctggtgttctgaccccctggaaccacaggggaagggcagaactgactccggaaaggtgtcctccagttgccacatgcttgctgtggcatacatataccttcacatgcttgtgtgcccatgttctagcacacatgtacacatacagggagaaattaaaactgaaaaataaaaaaaatatataaaatcttggaagtatttgtgaaactagttgcacactgtcatatggcctcttaattgacatgtgagcctaagggcttgattccttccaaaggctgtctctgtctagtgaattaaagcaaggcctagctttggtctgtgtgggttaatgaggtgacatttacactcactgaacgtagggcctgaaatagaaagtactcagtgatgctcatttggtttatattactggggcctggctaaagaagaatagtaaaatgtacagaaaactttaacctttcccttaatttatattgtttggaattctgttctgttctgttctgttctttttaggctcatgtcacggctctggtggcagttgctgaacatgcaggagaatttgaaaggattatgcaactttcagaaaggttgttgtttttcttcttcttcttcttcttcttcttcttcttcttcttcttcttcttcttcttcatgtgtgtgtgtgtgtgtgtgtgtgtgtgtgagtgtgagtgtgtggtgtgggtgtgtgtgtgtgtgtgtgtggtgtgtgtgtgcgcgcgcgtgcgtgcgtgcgtgcacgcgcagatgtgtatgcatgtggacacccgaggttgacattagttgtcttctttgatggatctcctctctatttattgaggtaagcttcctgactaaacccagagctcactggttctggctatcctggctatcctggcttgctcttgggattccctgccctgtgcctcacaagggctgagttgtaggaagccaccatgcctgcccacctgaggagcggaactccagaccttagactttagctgctgagccacctgtctacctctggtgctacttctaattaggatttgtaatttatgttgctgaggccagtcttgaactcatgaattcaagcagttctcccaccttagccttcttagtgcagaggccaaagcatagaccctacactggctctaatggagattttaaagagttgctaagaaagatagttatggccaatataaataatatcaaagaattgttttttaaaagaatgaggaaggtcgggtggtggtggcgcacacctaatcccagcactcgagaggcagagacaggcggatctctatgagttcgagaccagactggtctacaagagctacttccaggacagcctgcaaagccacagggaaacccagtctcaaaaaaccaaaataaaataaaaagataaaagaatgaggagagccaggcatgatagcacacacttttaacccggcactcgggagacagacacaggaaaatgtctgagtttgagaccagcctggtctacatagtgagttccaggccagccaaggctacacagtgagaccctatctcaaagcaaataaaaagatgaaggaggaaaagttgttaacatcgccctaaaagcagagtgtttcctttttgttctttagggagacactgtgctctcctggcctactgtagccttctcaacttgttctacatttttaggtatactggattcatcctgccatgtctgggagttcacccagttcaagaactttcaccagaagaaccaagaagtgtgacattaaaggtaaaagtcatgtaaaataagagccataaaaatgataactgttgactctgtgatcacccactgtggacagaagtttctgtcccaccccatcctgcggccgttcagtctcaaataatcacacagaggcttatattaattataaatggtttagccgatggctcaggcttcttataggctacttctctcttaattattaacccatttctattaatctgtgtatctccatgtgatcttggcatacgggtgatgccaggacctcttgcttcctcagcagctacatgacgtctctctgactccgcctactacctttctttatctgtttggatttcccgcctggctaaaccttgcctgtccattgaccgaaacagctttattcatcaaccaataagagaagcatatattcacagcatacaggaggacatcccctatcaacctccacacccatgtctaatttctatgctttgtgatgaggaagggagcgctgaggattagtgcctcaggcatgctaggcaagcatctcaccactgagctgtaatctcggctaaatgttttttttccgagacaggctctcactgaattgcccaggctggccttgaatccataatcctcttggctcaacttccaaactgtcagaattgcaacctgtgccacagcccaactgatttgtattctaagtgaataaccccaaacaaagaaacagcaccttccaccaactcaagattgtacgacaggatggcacagtgcagttagggtttctttcttccatatgttttaactgtgtcatgctgttttgtccatttaaaaaaaaaaaagtgacagagtgctggggagatggcggggtcagaagagtgctggatgcagaggtgtggtgacctgagtttgaataaccctgagtgatggcaacacctcagtgctggggaggtggagacaggaggatgcttggggattagaaagagaccaatgaaaaaagaacaaagggaatatggcaacaaccactgtatggaggaggcagagccatgtttgtgatgaccgcccacatcttcccgcccaccccagggacttcaaaacggggtttccacttcaggtccctccaaacctgtgcagagggtggggctgtagccagagcctgtgaggatggatggtcctactcagatttctagttagagttgctgacatgatagagacgatggctcctatgtcataggttggctaaatgaattcagttgtgtgaagcacccgtgtggcagagggcctggcacacactctgaaatgagggactattattcctgctctcagcattaacacttttttttttcctcgcaggatttggatgtagctttgcctattattgagaagtacaaggatcggttgttggcaattggagaggtgagtccgcttgttgatcagatgatgtctaatgcagatctccatgggatacatgcagtaatcagtactagtgatttaaccagcgtggacagttatttccactctgttcagcctgctgataactcagtgctattgggaatgaggccggggaaagccttactctagacttaccttgataagagaagttgatgtaataacatttctaaagacttggctttcgcttaagcttggccattgctctgagaagctaaaacagcctgtagaggcagggccagtgaaacggttcagcagccagaagcactcaccaccaagcttaaggccctggatccatgtgatggaaggagagaaccgactcctgagagttgtcctctgacctccacgtctgctctgtggcatccacgtgtgcctctccacccacgaaatgtaactttaaaacgacgacagtgctgggcccacacctttaatcctaacacttgggaggcagagacaggcagatctctatgagtttgggaccagcctgatctacagagtgagtttgaagactgccagggtggctatacagagaaaccctgcctcaaaaaacaaaaacaacctttctaagtagcataaagatatactttaatcttgagtttgtgtttaaagaccgtgttacttaaattattagtaatggtaaggagtttttatcacggtagaaatcactgcttcctactacatagaaaatataaggaaacacattctgaatagaggtcatagaatacgtgcccaggtagcctctatgggagtggtcacctgtggtcacgacagagccatgcaacctttgacgcttcatcatgcgtgcgttaggtgactgcagtgaccagtgtgactttggaaaacttgcaggtgtgtgacatacacagtgagttttaagaattgaagtaccccacaagaggaatataaaacaaacttagaagttggggtatgtcatatatactattaaagttacttgtatgtactttggctaatattttaatctagggaatatctgtgtgctgaatgatagtctctttgggcttatcacacatggaaaggtagttatcttttgtctttctgttacaggtggggctagacttctcccccagatttgctggcactgaggaacagaaagaagaacaaagacaggtcctgatcagacaggtccaattggccaaaagactaaatgtgcctttgtaggtgaactgtctttctgctcagacctacagagcaaattccataacagctggtcctcttgaaatgagttccatctctcttcccatctgagctattttttaaaaattcattctctatgtgtgtggtgttggcctgcatgtatgtccctggtccatgtgtgtgcagtgcctatggaggccagaaaagggcatcggatcccctggaactagagatacacttattaacctgctgttgccatttgggtgctggaaacaaaccatgccctttgcaagagtagctgagccatctctccagcctcctgaattattattgttaaaacaacaaaaacagtattttcctatttaaaagacttcaaaggaattttgttgttgttaaacagaaacgtgcactcacgctcagcaggaagacccaccatcaacctcttacgtgaacaaggtacatatgttcctagtattcaagcttcccaattccaactgaaggttgaaggagcaagtgtgtgtcatttgactccttaaatagaagggaatgcatctagagtagaggtaaaaataatccactaggatgagtttatatgccagactaatattcacaaggttgttttggtgcaattgtgtatttatcaggctcacctagagcaaatgaaaacttgaagctctaattttttatttttctttagattttccgttagatttatttattttttattttatgtgtgtgagtgtttttcctgcatatatgtatgttccctgcatgtgtgccaggtgtcctcagaggcctaaagagggaaggcatcaagattgttgtgccatggaggttttgggaaccgaactcaggtcctctgcaagagcagcaagggctcttgaccacatagctatccctccagtccctggctctaataagaaagggaaaataaggcaagaaggacagtctgattgctcactgtgtttttctgaatgttttctgtgttttgcttctggggccagataatagaggagcttgtacccaagcctgatgaccagagttcaattctcagatctcataaggtagcaagagagaaacaagtctctagagcgctgtcctctgacttctgccatggtacctaggtgctcgcacaagcacatatgtaaataacaaaagaagacagtgctgtgcagcaggctgtggccatcatgtgtctgacagattacagtcacctgctctggactttcttgacatgaacataatttacagcactcttttccaaagtttaaaatgccatgtacaataagagatacaccttatttttagactcctatgtgcataaaaagctgtcagacattgaacagtgtgtgtatatgcacagatgtgtttagtctacagttgtgtgtttacagaaacacacattggttgattgggacctacaaaataaattttacaacaaacttaagatcataatgaaggggctggagagatggctcagcagttaagagtgctgactgttcttccagaggtcctgagttcaattcccggcaaccacatggtggctcacaaccaccttgaatgagatctggtgtcctctgctggcatgcaggcagaagactgtatacataataaataaataaaaatctttttaaaaaaaagaatcattagaagaaaaaaaaagatcataatgaagattcacactatttgaaaaaacagatgatgaaataatggcgctttctgcagctagaggtgtggtcactgatgtattcctcagcaatgagcactgagcccttccagagcactgaatgcatggtttttatgcaggttaaacagctgtccttaagagctggacttggtatggaagagtgtaccttagggctattgcaacacacacacacacacacacacacacacacacacacacacacacacacacgtacaaaaaggacagggattggttttatgagccaaggcctgttaaatttgtgagtccattttttttttccaactagcatttctgttaggaaaatgagtttacctaaaatcttcctatcatgagcagtaatataatagttgatagaaaggtctggtggtgtagatagttcagatggctgttttaaaaactgtgtttcaatgataaatattttatcctgaaaattaaaatctcatttcccctcctttgaatactgcatttgtattgcaactttaggagttatggaatctgatctttatgtcatggtggtaaatacttactaagttcagatctgtttaattggactaatggggaaagcctctgttatgggacaaaatggaactctggtttctctttcctttgagaggtgctgaacgggtcctgctgcacgcatttgatggttggccgtccgcagccatggaaggagtcagggcaggctactacttctcaatcccgccgtccatcataagaagtggacaggtaaagcttttcatcaaagctcactaaacactttgtgtgacagagttcagaacctaagctgtgtgacaaagttaatattaagtctctacccaaacatataaaaacttaactcaaaaaaggatctgaggctgagcagtggtggcgcacacctttaatccagcactcaggaggcagaggcaggtagatctctgagttccaggacagccagggctacatagagaaactttgtctcgaaaaacaaaacaaaatagcaacaaaaatagtcagagggcttgaattctgtccctaacacccatgttggatggctcacaaccaactaataagtccagcttcagatgaactgacaccctttctgtgttcacatgtacaaccccacccccccccacccccccccccaccccccccaccccccaccccccccccccaccccccacacaaataaaatcaatctttaaaaaagaatggatcaaggcctaaatgtaagagccaatttttgttttggtttggttttattgttgtttttcaagacagggtttctctgtgtaacagccttggctgtcctggaactctctgtgtagaccagcttggcttgaactcacagagatctgactgcctctgcctctgcctctgcctctgagtgctagaattaaaggccggcgccaccacctggcccatgaaagggattaagtaggtactgctctaaagaaagtaacacaaatgaccagtcagctcggtgtcactccctcaggaaattgcagagcaatgccactctacaccactgagtctgggagtccacccaaaattaagtgtagaattacaactacccactaattctaccctaggaagatagtcccaaagtgggggaaaaacatatcctaccacacaaacctgaacctgcatactcacaggtgcatgtgcttagcagtcgaaaacacagacaacctacaagtgtgaagtgtgcctactgataaatgtcagacagacaaaacacggcacatccatacagcaaagtgtgactcagcaataaagaggagtgggctacttaattatgtcacagcatgaatgaaatttgaaaacatattaggagaaagcaggcacacacaaaagaccacatactgtgtggttctgttgatatgaaaatgcacaaactaggcaaatctatggagacagaaagtcggttggtgtttgctagtggttggagggaagaatgagaaatgactggtgagggactgggtggttggtgtgtgtgtgtgtgtgtgtgtgtgtgtgtgtgtgtgtgtgtgtgtacattcacacacacacacgtatgtactgcagttccaggtatgggactcaaagcctctgagacatgttaggcagtggcaccctcagcctaaactgtgtatgtttaaagggtgactgttatggcatgtgaattacagttcaaaatatttacaaagcaatctttaataacttgccatgtttaatcacttttttaaaaaagattttattatatatacagtattctgcctgcatgtatgcctgctggccagaagagggcaccagatgtcattacagatggttgtgagccaccatgcggctgctaggaattgaactcaggtcctctggaagagcagccttgaccactgagccacctctccagcccctttaatcatgtttaccacactcattttctcatgctccgtgagatgagggtacagatcacaattagtgatgtcttcacgtctgtgaagcacatctgtatcataattcaaaaaacgaatgtaggtccagaatacagaattgtggtacagccacttaaatatattcatcagcgactgttatctttttaattgattccttacttttatttggttacatttagttccctagacgctttggataatttttgcaattttaggcttttttttttttttttttttttttgagacagggtttctttgtgtagccctggctgtcctggaactctgtctatagaccaggctggccacccccagctcacagagatccacctgcctctgcacctacccccaactcctgtgctgggattaaaggcttactattcctattttacagtggccatttgaagtaggatggtgagagcaggcagttgtccagataacacggtggtcttgtggtaaacacgggtgttgagtcctgcaggctgagattcgtccacatgtaagttgatgccattccatcccccgtgtaaagcttcctctctcttctctccaagaagcagaagcttgtgaagcagctgcctctaagctccatctgcttagagacagattcgcctgctctgggaccagaaagacaggtaagcagatctctggtgtatggggtgcagatgtgtcttttttgggggctgttctggtttagcaggactcgtggcagtaccctaatgctaagttgaggccatgtttcctgaagtcttccttccttccttccttccttccttccttccttccttccttcttccctcccttccttccttctttccttccttccttccttcctttcttccttttcttttactttcttttttttttgttgttgttgttgttgtttttgtgttttggtttggttttggtttttcaagacagggtttctctgtgtaacagccctggctggctgtcctggaactcactttgtagaccaggctggtcatgaactcactggaatttccctcctctgcctctgcctcccacgtgctgggcttaaaggcgtgcgccacccccacccagcttcaagtgctggtgttaaagccaccatgcccagcttccttggctgttcagaatatcttctttcctgtgaacaggatactgtctcacagatgttaatgagacactccaggaagggaatgaaacctcatctatgaaaagcactaggtttaaggtagtgtgtccttccaggtcactcaacccatgtacaggcatgcatatgtacacatgtacacacactatacaggcatgcatatgtacacaggtacacacactatacaggcatgcatatgtacacaggtacacacactatacaggcatgcatatgtacacaggtacacacactatacaggcatgcatatgtacacaggtacacacactatacaggcatgcatatgcacacaggtacacacactatacaggcatgcatatgtacacaggtacacacactatacaggcatgcatatgtacacaggtacacacactatacaggcatgcatatgtacacatgtacacacactatataggcattcatatgtacacatgtacacacactatacaggcatgcatatgtacacatgtacacactgtttcgtatctctgtcaggaatacatactatggatgtgcttttcctcagggtttaataaccacataatgttccactgttaaaacttcatattagggaccggagagatggctttggggttatgagcattggctgttcttccagaggacctgagttctattcccagtacccacataatggctcacacccatttgtaattccaatttcagagaaccaatgccctctcctggcatgtggtagacacacacatgtaggcaaaatgctcatgcataagacaataaagttgtcataaaaaccttggtattagtcataaatatacatatgtgcacatatgtacacagtgtgtgttttaattttctgagacacagtctcatgtaagcagtctgacctcagagtcaatgtgtagccaggttaggccttaaagtcaggatcccctcctggttctacctcccagctgctggggaggtagtgtaagtccctacactcagccaggctgtaatttaaaaccatgataaacaaaaagccttcaatgtggatcttgacataattctgatttttttttagcctgtattatcaagaatttttttttacttaataattttattcctctaattattaccccaagtatcacttattaataatttcaggaatgtttttcactaagtctaaatgttattgattgcagaaatagttttttggtttttttgtttttgtttttgtttttggtcattaagacataccactgagtgtaagcaaaatgagtatttatttcacaggtattaaaagtcagtgagatggcagaacctacctgagcagtctttccagtccttggggcattttagatcacatgggcaggtggccaaccagagtgcagtggcctttcccagcactcacatctacaaaaacaaaggatggctaacccttcagacaggctgctgtccctgggttcaggcatagactgcttcgtatgctgggtgctcagggcttcaactgcaaatacctctaggttcttttctaagcagcacagacctagagccagcattgtgaccataccctgccaagttcaccgacccccatttaaagaagcattaataaagaaatgtcagttccttcagcgtagacaaggagtgcatcattcttgtttgtgtgtcttagctacagtctccagggatctgtagactcagagatcagctctgttctctttcagacacggaacgaaccctgcaacatttccatttcagcagaattcattgcccaagtgaaagggatctcagtggaagaagtccgagaagtgacgacacagaatgcattgaaactgtttcccaagctgcagtacctgctccagaaatagcttcaaaaccacccactacacagccagggcagctcagggcagcactgaggaaaacaagtgtttgaatgaacaatggtctgaaatgaagaggccattttatatggacagcagtcatagtcttacagaaacatttcccttaaaaacaaatcctgggctgagagatggctcagccactaggagcactcagttgctgctcttccagaggacgcgcagtgccagcacccacgctgggtgacttgtagctgccctcaactccagaagatgcagcccccctcttctggcctcctctgccactagcacacaggtggcataccctacacacacacctaaacatgaacaaaaataataaaaataatgatttctaaaaatgctgtttttaaaaaagagaggttcagctttggctactgaaactctgggttccaagtgtcaattagcagagtcctggagcagactggaaaataccacagacacactagcttctggagtgattgcccatttgaggggagaaagcctcaagggacccctcaaccctgctttcccccacttaacaagcttatagaagatgttccagggatttttgtctttgaatgcttaataattagtgtgcgtatggcagagttcggtatacttgagatgtggtggtcgggtgaacctctgggcatgatgtccaaactaaagtgtgtgggtaagaaggaaccaggtcagagttgtacaggggaggggccttttccagaagaaacagcagttgtgagagcactgagatatccacctccccgcttaaagagacaaacttcactatgtggcctggactcagtaagccgttgtacctgagcctcatgccacagcacctggccagtaaaggcgtaccttcgaagaagtgagcaggcctctgtgatgcgggagggagatgtttgctggtttcactgatggagaagataacagtaggagagagactggtccagcttgtccatacacctgttcttgaaattaggaagcctgtcatcttgtgcttaagtgaaacagttagggcacaatgatctggcccaggataataggtttgatcagggtgatggcagccattgtgatttatactatctctgggatcttggtgaagacatttttaagactgaaatgttagaacccatctgccactgggtcacattgcccacggcagtcctttcccgctcacagacaccacagctcctcagagaacaccgtgaacctctagctaacagacttccaagttccaggatctctcatctggggaagtgagtttacatcaaagagtattggttgccactcatcctgctccccaccctctcctacctcctgccttccaatcagagctggctacaggcttgtgctgtgaaacctccactgtcctcagagataagcagagacctctacttctgccatgggggaggggctagtcctctcttcagcactccctatgttatctcaactttcctcagagtctctgccatgctgttgtctgtctgtgacattaatcacccttttgttaataacacaagtctctcccaatgtccccatgagcccccatccaagacctttcattattctaaagagatacctgtacccctccttttggctggctatcagaatattaaaacaacaaacctcaaggaattggaacttcccagaaatctcaagcttatataaaagtggcttcaatccggtgccagctggaggaaacacatctccccagaagagatcagacaggtctgacaacttaacagtcatcttacaggacagcccagagcctgcacagtggtgtgtcgatgatggctgagaatgcacctccaccaggacgatttagacatacatttccccctctgtttaactctcagccctatgcacatatccccacgatggcctcctgattccctcccagtgtggccacagtaaattgtttttttcattcctgtcccccaaccccaaccccctgtaagctgggctggcctgaaactcactacatacaccaaccagactggccttgaactaacagacatttgcccctgcctgctgagtgccaagattaaaggtgtgtgccaccacccatcctaggaacaatgtctgaggtccagactgctctgtaaccagtatcaggctcacggaggaggacgagcctacaaaggaggtcatgatatgaaagagtgtttcctgaaaaacctccaagagaaaagtgcagtctctggtgttggttcctaagtggagtctcttgtgctcaaggaaagtacagacttgggtaagggcttttatgtctgacccaggcccttcttgttcggaagcctacttagatggtcggtctggttggttttgattggcctctagctctgccaccccatctctctgggcacactgcagtgctgagaaagcacgaggaagtctgtgggagcttagagaggaggcctcagctgcctatggctgcagtaacaatgctgcaacactaatgttcttcccagaacactggggaagcagcaggaatcatgtgtgcacattagtgagctcagctgtggccctgcaggaagccagggcagaaaaggaaagcctgttatgtgctgactgagggaacatgccactgatggataggaaggaagtgttcctgaaggtgacaggacagtggggtcagagtccagcacgcctgtatgtctgcgtttctggctttagcttaagactgctctaggatacccagggcaaagtagaaagagttcatgggaagggctgaagggaagatgttatggaggaggtgacatttaaaccacagcggggagggagctcagagacaaagcaggttcagagaaccgcaaccagttctaccaagacagaggcacacctccaggagaggctgcaactactgtgtataacctggcatttgttgctctgcgcccgttcctaaagaatactgtgccttgtcatctctaattgggctgcttaaggtacaaactctagatcagatctcttgtttctgcccaggctaggagcagaggctctgatagacttggtaccaggtgatctcagaggacagagagaaagtctcccttcttataggcagagagaggcggggttgtttatgctcagtggggatcctcagctgtgcagcccaaacctgtgtgtatctacctgccagcattgcctagccctgaggcaagagaatcagctatagctggtgttttctggctgtgaaccaagagtttcatctcttttgtcaatgccaatgctcacaaaagtaggaggccacccttcaaggttcttgcaactagctatgtactgttgggaagggagaacttagctctagtcttattttattacacatccccagcctttttagggacaaggtcctgagatgtagcccaggccggcctggaattcactgtcctcctgagtgctgaggttacaggagttcactgtggcaccaggccagtttcttttataggtagcatttctaaataattcacagacattggagactgatggaagagaatttatttgtacgtctctagacttgtactttatccaaatatgtcattatctgaaagacaaaaaaaatacatttattgggctggtgagaggactcagccattaaaggctaggctccaaacaaaacatcaaaaagaaatacatttcagtactctattttagtttttagaatagcctgaagggcagagaggatcatgactctttcacttccttgtttttgtgctgggatcaattgtggacatggcatgtttgaaacacagagaggagagacagagaggaaggcagggagctgtgccgagctcctgaggttggaggcagcttgacacgtccagaagaggaagaaagcaaatggaggaggccagggtgagcgcaggagacctgcgcctgggaccgttgaaggagaaccgtgtggcacagggtgggaatacgggctttatcctcagtgtgacaggaaaccacagatgagttctatgtagcaggtagcaggttctgaacgcttccctgggactgtcctgtgaagtaaatgcaggagcagagaggctacaaactggatagccacggggcccctgataaacttctctaattgtaggttgggccagtgcggtggcaggttcagattcaggattgactttgggggaggatttgacagtgctcgctggctcgctcactcactggatgtggagtgtgagggccagagttcccctttggctactttcccagatgaggaagggaaggctggtgtgaagtgatgtggctgataacaggaactttgtctcatcgacactaaactgcaggtgacttcaagtgagtggcagtgtgagagggtgtgataggtcgtgtccatggctgaagtcagaaatcatgaggtggggtcatcagaaaagagataagatgtgatcctctgacagctgtttgaatgggacatctaggggaagtggtcttgcccgaaggagaagagctctgaaccgtcatggctttgctctcctgctctctgctttgtgctccaggttcagctgccacgcctgcctgccgccctccacccagacactgtggacaccccccctctggagccgtacctcaaactgagctcttccttctctgaggtgccttggtcatagtgtcctattacactgacagacagtgatctgcacagtccaccagctgcctgcatgaggagcccaagaggaccacaagggctgctgttgtacccctcacccttccaacatccagggtaggagagactgtcttccgaagacaggctgccactttgtagcaagtgatatatttataatctaccaaattaatataacctactaaattaacactttcatgaaaccctaatgccccagctcctaatttaccagacggctttctctgcacctctggccctcagggctcctcctttgttctcagcagagaggagagcagcagacgtcaagctctgctctgggtaatgaatggttgcttgagttctttttagtgactttctccagtgaaggcctgtcttttcaataagccaaccttttttatccacatcctatttctcaagttggtagaaactcaaatcacaggcaaaggctctcaaaatgtgaaagacttaatgcttgggggagggttactggtttacagttttgacactgttaatgttggttgtggcattagatatgttagactctgcgttgtatgaagtcatgtatgctcctctaaaagatggactttccaccattaaagtgctgagaactgacatactgttgttctgaataagtccagcataatgaagagcattcattgtgtaaaggtgattgagttttgtttgtttttttttaaaaaagcaatacaatcattacagacagcctcaaatcacaacccagtgtctgggttttctgtgccacactctaccactttcctgcaccactccctaaggacaccggccaaacgcaaagtcatggccgcataatggccagtgcgggccgttctttgtgaactctattgaagatagttacacatacacactttgtccacatagatgagaaatcagtgtcagttgcctaccttgactacggaacagatattcacaacccatgtttgtaacactgtgaaaacacatgcccgccacccaacttccctccatagttttattactgcttctcatggcattgtatgacacatttgtttgtttgtttgttttccaaaacagggtttctctgtggctttggaggctgtcctggaactagctcttgtagaccaggctggtctcagacacacagagatccacctgcctctgcctcccgagtgctgggattaaaggtgtgtgccaccaacgcctggcttgtcacaattgttattaaaactccattttacttccatgttgaacataaaattctgcaaacaacaaaaacgggcggcacaggaggtctctgaagggaatgcgactgttctcaaagtatggttgtcaggccatcagctggcattggtggcacacacctttaatcccagcactcgggaggcagagaggcagggggatttctgtaagtttaaggccagcctgtgagttccaggacaggctccaaaactacacaaagaaaccctgtctcaaaaaaggaaaaaagcaaaaacaaaacaaaaacccaccttagtctgctgggaatgcagactgcaggacccagacaccagactatggaatgaactagcctgtggcggggcatggggtcccatagacacaagcaaatgagtctctgctctatagtgtgtcttaactaaataatctgtttttgccttcagacacattgccacgtttatccctcctacaggttggcaagagtcctacccattatcttacttttcggtgagaagtgctttttctccttatgaacaaggagatcccgtttgagccaggaggtcctgttgctttcaggaacagactctttgacgtgtgtggaagctgaggactggtaggcctggctgaagtgccgcttctgggcgcgcaggaagctcacttgattgctcctctccaccagacagtgggactcacgcttttcgtttatctcttccaggagctgccttctgctcattctgtttctttgaggatagatgcccgtgttcagagactccattttgttaacacagcagttatcagctgactcttgacggcctgaaaacacaagaactctgtcactggcattctcaacctggcttttgattgtatcatcatggtgtacacatgaaaaacaagtggggacaggatccatattttgttaaaagcccgttttatagatctgctacaaaagatagacacgtaaaggctcattcactgagatcacaaaattaaccctttatatcacttacaaatttgagcccaacactcagctatagaatccagtagtaaaaccatggacttctggtcatttgggtttctgtgctagctgtgtggcctactatgcacacaccttgtttaagttacttacctcctctgggccccagtttcctgacaagtcagtgcagacaaccagctcaaagcatcacagagactaaatgagctaatacacatcaaaagtctactgttgtccatcctcaacaatggtcatgtaatttatcacttaattgggcgccttgaaaaaaggggtgtattctctctgataagtaaacagtgtatcgtggtctcctaatcactgctctgtttacacgtgtggtgatgaatattggtgggatccagtgaggctgaaactcttgggttcttgtttttaaaatcagctgagatgttcagggcatccaaagcagaacacctgccaagtctgaggccctggtgagcaccagactgcacaggctgcaagcctagaaaagtggccctttgcgtgtctggcacaggaacaggtcagtctccacagcttgttctcctagttttacagtcttctagatggagataagatgtgtgtgtgtaacctgtgacattgaaggtatttgaaaacatgaagcatgaacacagcagactttatttgttgagtccgtattaagctttgctctctctaaaatctgtgcccagttcggtacttgtggctttcacagttcatggaggacatcgtgcgagagcagcaagaagtctaagtttcctgtggcctcactccctgggcaaggattaccttcttgtctcagctctcagactctacctcctgtggtctatttagcatcatgttcttcacatttgagaggttttgtttctttcgatgtttaagatgaccgagggtagaactggcatgctgtcaagaattgtcacacatacaaaggtgtaaacactttcagaaggatgtgttaggtaaggtttgtatgggcctgagaggttggctgtgaattaaatttgagtcctcaatatagatcaaataagatgtcttcaaacagaaacagggaaacaggtgtataaggaggctgaggcaggagaatcatctgggcccagcagttcaagaacaggctaggcaatataatgtgatcccttatcaaaataacaacaaactacacacatacacaaaataaggttatacaccgactggttttccaaagcttacaggaacttaaccatctaggagactggtattccctaattcattgtttatagtgattttatgaatacaactaccagaataatgagaatagactatatacagagataaatagtattattgtttctacagacacaccaactataaattacctttaacaccaccaacctgaagtccacagtgggaatcacccactggactgtacccaggagatagaactttctgagctctgccacctcagctctgttctgttctcggaaccctgcttaacagaagtttcctcagagaccactttcttactaaccatgtgtccttggctaagtgacctgacctgtgttcactgtcagtgatgttctttgctgcagctttggcgatgaaacatgacccagcaaacttaacaaaccacgggggtgggtgttaaccaattgggagcagaatggaaagagagagagagagagaggagagagaacaggtaggaggcacttgcttatcaagggaaagggagtggtttagatcaagactcagcagttggggtccttgaagctggagtcatggagctgctgttggccgaagctccacgtggtttctgcatgcagagtccttatgcagcaacctggcgcatgcagctttgacagcctttgagctgtcagtgaggagcgattacctgtcaaaggtagatcccagggctagggcaggtcacccggagaagagcgatcccagggcagggagagagcctgaggagtggagagcctggcagcaaccaggaaaggttccctaaggagaaggcacaggcccaggagagagctggcgaaagtgacaggcgggtgctgaggagaaaccactgggcgggccggagaaggaaaggagtcaggagcagagccaggttgcccaggacctggggagagggagaagccaggatatcaacaagtgagatactaaatcacctgtgaaaaacgggaccaaagacactctttgagttgtatgacagatggcggggaagaagctgggactatgtaaggtacacgtggaaaactgtgctgtgtgtgcttctgtttgctgtatgctgaatttcttcagtccccactctgtgcctggtgacaaataagagccaggggaatccctgaaatcttaagcccagtgtgttgcataagcctgaaatttcagctacactcagaggctggggaacaaggatcgctcgaaaccaggaatttggggccaacctgagtaatgtcatgtgatctcatctccaaaagaaaaaaattacctttatattttgcacaaaggactatttagatacttgtttgtttttgtttttttagacagagtctcactatgtagctctggctgtcttggaactcactatgtagatacgaggttggcttcaaacttacaaagatcacctgcctctgcctctgagtcctggcactgaaggcgtgtggatacctttcttcaaaagagatctcctcctgctttttaagaaaatcttaagtgggggctggagagatggctcagaggttaagagcactgactgctcttccagaggtcctgagttcaattcccagcaaccgcatggtgactcacaaccatccattatgagatctggtgccctcttctggtgtgcagatatacatggaagcagaatgttgtatacataataaataaaaaataaaatctttttaaaaaatttggaaatataaaagtcaggatttcttttatatcttgcaggacttagtgacaggggaaagactgttagtgaaagtttacacatcattcactgaaaaagtattgtggcagtcagcaaaagtatgctagatcacctgagtctagtgattccttgtgttaactaaggagaccaacagagtggctggagggacgagaacagccttgtcttgttttggatgccacacataatgcaaaggttatcaaaagaacacagatccactgggcataatcttggcattttcaaacccagggctaggtctgaattctctcacttccaggacagctggagggaggtttttaccttgtgagctttgccttacccagtgatagggctaaccattataaacctttggggtttgataacaaatcaaagtgcctgatggaattaagcaagaaagctgaaaaagatgttcaacattagtttctctaaatatatttgaggttatgttgctaatccagaaagttagtcatgatgtgcccaataccattattttataatgtgatcatctgtcgtataaatagcctaccctggattattcacaagcaacagattttcctcgcccagagattatctcccctgcaggctgcactttaacgctgcactgatccctgtcctcccaatactttgatttactaacgaccctcactgaagtcttacctcattctattccattgtgagcactgagcctgtgttgacatcctcatcttctcaggtctggacctgaggaatttgtttgctatggtagtgtcttagttagggtttctattactgtgatgaaacaccatgaccaaagcaagttgggaagggaagggtttatttcactcacaattccatgtaacagttcatcttcaaaagcagtaaggacaggaactcaagcaggacaggaacctggaggcaggagctgatgcaggggccatagagggagctgctaatcggcttgctcctcatggcttgctcagcctgctttctttctttctttctttctttctttctttctttctttctttctttttctttctctcttttttttttttttttttgttttttgagacagggtttctctgtgtagctttggaggctgtcctggtacttgctctggagaccaggctggcctcgaactcacagagatctgcctgcctctgcctcccgagtgctgggattaaagatgtgtaccaccaacgcccggctttcagcctgctttcttacagaacccagtgccaccagcccagtgatggcaccacccaccatgggcggggccctccctatcaatcactaattaagaaaatgccctatagacatagatacagctgtatcttatggagacattttctccattgaggctccctcctctcagatgactctagcttgtgtctggttgacataaaactagctagcacatgtccactgctgtgccaaggatactcattcactgaattgctcccaagcattcctggctagaccagtgctagatgacttaagagagttgtgtgtggtgcagcgcacctgtgatcccagcacttggtaggttgagacaagacgcaggagtttgaggccagcttgggccaaatagtaagaccttgtttcaaaaaaaaaaaaaacacaaaacaaaacaaaacaataaaaaacgtttaaaataagcagtataagaagctttttaaaaatatgattttagatggtttctgtcccaaacagctaataattacctgagataccaatatgactattagtactaaaatagtattgtatatataacaggactgtgaagggacatgtatgacttgtttgcatgtttcctcaagtcgctctggagacaagtgagcttataaacacatatgctgtcctgtgagagctatacaagcttctcccaatatttatgggaacaacgtggacccttcagtaagcacaggccaaaatttggtcatgtgttttactgtctactgagcatctgagcatcttctcttcttcctcaagttcctctcacagaccacctgtgtttgactccgctgcccttgtcaaggacgtccgtgcttctttacgaggataaagctgagactggaggtcaaggccttacctagtttggccccagactatgtcctttaccttgtagccatccccagtctccctgagatgccatttctactcttgctagccggcttctctcactatcgggggagctctcctgagtgaagttgaggtgatgtcactgagtccacttctctgtgacccactcttccccgttcccccaccacattccttcctgaggctacaaaggccttaccaacccttcttcacggtctccttcatggaaagaatgtgtgtgtgagcacgcacgcccacggcttgccactgcttgttcatcacccgggagttgttccattccactctctgtcttcatctcagaatggctggcttactcggctgatctctgggcttcatcctgttctcccctttgcaaagacctctttggattaggtgactgacttcttgtggcccagctccatctggcagtccctctaaatacagcttttagggaatactcattctctcaactctacacaagcagacgccttaggctcctctggggacatgctttggactggccaggggtaggcaaggagatggaaagtctacttttgcctgcccaattccttctccaaggctttaccagattaattccaatgtagtgaactctaaagagaagaataaagaggttgcacaattgttttagcacaaacttggcaatgaagacatcagctactatagcgggagagtgagcagttgatttattgtaaaactcagggtgtcttgaatgccatgtatgtcattctgtatcttaactcctccccccaagaccatctccaagcaataaaatcaacaacaaactcccaaataaggctgtagagatggctcaggtgttaggaaacattgcttttgcggaagacctgagttcagttcccagcacctatgttagatgactatgaccacctgaaactccagctccagggcctccaacaccctggtctggcatccttgggtaccagcacccatatacaaaaaaccatacacagacataattaaagataaatctttttttaaaataccttcatcaatggggaagggggctaggaaggagtgcaagttttgatcaattcaaatgaagcaattaaaatttgtgaaagacctggatggtggtggtgcacacctttaatcccagcactcgagaggcaaaggcaggcggatctctgacgtcaaagccagcctggtctactgagtgagttccaggacagtcagggctacacagagaaaccctgtctcaaaccccacccccatagaaaaagaatacattttgatctaagtttgaacttactaaacttgtaacttctactttaaatattttagacggtatgatagtcaggttttccatgactgtggtaaaagggggaaaaggtttagcttgatgattgcagaggttcaggccatgtgttggccccatgactttggaactgtgatggggtaggatgtgacactggggttcatgaggctgggtaaagcattcactccatggcagcagagaaagaaaggggctgaggcccctaaaggtttctccacctcccaacacaaccatcagctgaagactatgtcctttaacacacaagacttggggagaatattcatgattcaaaccataacagatgatttgttttcttaggcttttggtagtgttcaacagtagcatttgttaaatgtaattaaatatagcattttcccatctccattgtagaaatatgttttagctttagtttactttgccctatcttgcctggtgcttacataagctagaagaaggcttcagatcccatggaaacagatggttgtgagacatcatgtgagtgcttagatccagggtcctcttcaagaccaagtgcttttaacgggtgagccatctcaatagccccatgatggatgataattttaatctaccaacagtgatctcactagaggcaaaatcggtcagttctccaaagcctgtgcaagctggctacagcataacaccgcttaagtttgcctcgttataaatcagtcattatatttaagaatctctaggggagcatagaccacatgtttaaccctgaaaagaattaaaatgctgagaggaatgtgaagttggtctcacagagattgaacgattcttgtcaccttcacggtgaggtttaacaagtgcggaatggctgaccccagatgtgatccggaaggatgctgcgttctcattcaccacactgacaactccaaccactgtgaagcacaaagaggaagaaaaacaaaacacaggaggggaaagtccgaagattttttatttttgttgtagaaagtggatatatgggccctgctaaactgtctcatcaaggagtgaaaagagtgcacgtagggggttttaaattctggacctgccacctctttgtgaagcagaatggcgtagccgccgctgctcaggcagacagagcaaggtgaatctgtccattccccacaaagcagaatggaccgcatgtctgttagcattgttctggcttgtgccctgtcctctgagtttcttggactgcagggaaacctttgctcaagaacagccacatcacttctaacatgaaaaataaatgacccagaggctgatattggggttcaaacttcatgctgaatatcagaaaagcaaagcagctggcagctagctctcacctctagctcaggctgaaagggctgatccacatgtatgaactcttcaccaagtctcagactgtaacctttcctcggcatggctggagaatgaatgcctcctacagaatccttgtcctgtcttatatacctgtcatgagtcctgggattaaaggtgtgagctataattctcttttagactgattcaatctcatgtagatctggtggctttgaactcacagagatctggttccctcttaatcctgagtcctaggactaaaggtgtgtaccaccacctcctagcttctggctgctgggattagaggtgtgtgccttggcttctatgacctgtagctgactttgcttttctgaatcctcagtcaaggtttaataaatcataaataatatattactacgttggaccttgactcccaggtgctggtcaggttccatatgactaaactgttactattcaaatctctacagcttggtgtttagcactcaggctataagttaatctgatctcaactcctggccaagcggtgctctcagtggtgtcctttccaacagaagttaaggttcatgtcatattctataccctaacatatggtatagagtgtgactcatgcctatgttagttaataagtaactacctcaagacaggaaagtcaaggttaaaggagttgaacacaactccaaagagatgttgctgagttttcttttttctctgtgccctatcttcatggagctttgctggacaggcatatgaatctaataggaacaggcttatggatctaacaggaacaggcatatgaatctaatatctaattcttccagtagaagtatcttattttactttgcatatagcaacgatgtcagaagaaatctcagatatcacacagctcagttttctgaggattctgttgaattcaggaatcatatccacaatatacatgttcagacaagtttttaatgcttgtgggggtgggggcaatgttggtaatcatgtggttgctgaggtaaggaaaatggtggtctatccaagtgctgattgcctctgataaaagaaaggtatcccttgttaggcaatgagcttgttagataagccaccgagtgcctcattcaggagtgccctgaagacacccactagggatggaccccactattataaacgcagttggaaagtgcttggtctgaacaattgaaaatccaagcaggcttagacaagctggggtcaaccctaaattaatagaaagaataagatgtgagaaacatatgagtagataatagtgataacatttactgaatattaatataggaagaggtcaggctctcctagaatgtctggtatttactaatcgtttatttttcatggcaatgtcatcagtattaacttattttatagcaacatagacatgcacatacatgtacacacatacacatggggggcagggatacagacagagagaaaagggggagggagggaggaagacagggagagagagagagaagaaattattccaaggccgtatacccaaaaatgaaaaagctaggatttaaatcctagccttctttgaggcttgatatttcaccactacactagatttcttacgatctaaactgagaaatcctaccacataccaagtcttgttcaatcttttaatcatcataatagtcccacagaggattctgccatcgtattacaaaacagttatgtaaagtgcctcaggtcacacagctagtgaaaactaaaggttgaatttaggtctacttagccagtggaggtggtgcatacctttgatcccagccctgaggaggcagcagcaggaggaggatctctgtgaatttgaggccagcctggtctacattgtgagtttcaggacagtcaagactttgtagaaagactctgcctcaaaaatttatacataaccctaactctaactgaaaggttcaggtattatgctggcctgctctcgctacctggcggaaaaggcagtaccttgatcagcccagggttccatgggaactaagtctgcacgcaggtgcagaggaccctttaaaagacaggtccctgcccatttacgctctctctactcttctctctactctctctactcttctcctcttctctgtctgctgcttctcttctctctctctctaaggcaactggccatggtggtcagccattaaacctgtttctcttctcctttagtctccctactctgctgggcctataataaactggttaatatgtctaatatgtctctcagtcttatgcctcatccacctcttttcttccttatttctaatttaagcaaaaatttaacactaaccacacacacttgtgtgtggggtggggtgggggagtgggtatatgaatatgtaccttcagagtgggtatatgaatatgtaccttcagagtgggtatatgaatatgtaccttcagaggattaaaagtcataaagcttggatccacttctcacaagtaaaaaagactccagataagtacaacctatgttatcccacttgtctgttcctaaggatgggattttcgccctggtcttggaactcccactcttcctgatcactaaaactaggggtctaaagagttccaattaaataagttttaacttctgttcccagtttaaacatgtcttaaacaggtttctgcttgtggcagacacatctgattatcagttgctgacaacccaaggactttgagccctggacgtggtgtggatgtgaaccagtccagctgatgtggacaccccctgcctcttcaacagagtctgccaaccagctgctcctgctagattcctcattgcctgaactccctttatgcttttgactagcacttcagccctcttgggtccctaactgtgtcccaaagtcagcaggaagtagcatggggaagaatacattgcccattttccctggttaaaatgctaagtcaaaaggaatctcccttacataggggacactgtgacaacagatgcaaacatcactccctcagaaaaatctgtcagctaatggcagggccggttaacaccgctttgagcccctaacaggcaggattgagtcctgtcacggtacttcaagaaggggggaatgaagggacaaacccccgttttggcagccaggacaggctaacaggtgcttgtatgaccttgctggtcatgccttggtcactaggaggtcagatgcccaccttgtggcaaggatccaatcagaagttagctagcggggctgggctttacagctctgggtgtgttttacatacacgtgcacaacagtgatgatgtgcagagcgtggcaaccgccctgggagggcctatgggccgtaacaaccagttgacctatcaacacagggcaggtcatccaagctgggagcacaccaatcctgagactttgtgtacctctaacacttcccttacgctgccctcgtggtttctcagggtctttacgcagccatctgaggtgggtgaatgaaagtaatggggtcagctcgttaaaccactgcaataaaagactcattgcttttgcatcaaaatgggcctcttggtgatttgggggttcagaatttgggcacaacagcctaactttagctatgatgcccttccctgctcctgcagcctcccctacgtaggtaggctccacgtatggttatagcactataaacagaactgtgttatgtatggggacggtgcatgagaacaagagcaacacagacaactgtggagggaaattaaagctgatcggctgtgccagaaacctaggcaaacgtcaactaaccctgttaataaggagacaagagacccctctatcatgcagatctagtaagagaggacctccagttccaccaggtcaggggacattacctctaatatactttgcaggctgggactttggaaagggagagagtttacaaagaatccgcatgtttgcttggctaggcgactttagaaagggacacaacattcaatccctggatccctttctgaggacttttgttttttgttttttttagaaacaggttgggctgggatgtggctggtagagtggctgtctggtatgcacagagccctggggctgctcctcaacactgcaaaaaactgaacacggtgcctcacgcctgcaatctcagcacttgggaggccggggcagcaagcaagctcaaggcttgtctaggatatatgagactccaaaataaaacaaaaacaaaaacaaaaaattcaaataaaactttcaaatgtggtcctgctgtgtggcctaggctgcctttaaatctgtgggactgtatgattcttctgccttacccccgagtaactgggactactggcatgtgccactgtgcccagcttgaacaggtttctttttgagccttcacacagagcgatccaccgtacctgagagcattaaccagacaatgatgaatacttaagttgtcttgagtcttgaaaacacaaccaactcgccaggcgttggtggcgcccacctttaatcccagcactcaggaggcagaggcaggcggatctctgtgagttcgaggccagcctggtctccagagcgagtgccaggatagactccaaagctacacagagaaaccctgtctcgaacccccccccaaaaaaaaaaacccacaaccctgttttgacttgtttgagatagggttcctttgtgtaacagtcctggccatcctgtagaccaggctctgtagaccaggctggactcaaactcacagagatccgcctgcctctgcctcccgagtgctgggactaaaggcatgcgccaccaacgcccggctaactcactttttttttttttttttaaataaattcacggcaacccaggcactgtgagttcatcagtgccacagccaggcttgcccatgaaacagatttcaggcaggcctggtgtggcgcagggtagggtggtgtcgcacatctttatccccagcacccaggaagcagggacaaccttgtctccactgagtctcgggccaggcagggcagcaaagagagaccttgtttaaaaacccgcgggagggagggaggaaggcaggccggccgggtctatctaacgcccggcaccctgtgtttgcacacagcatcccacagagaagcaggctgactctgacactgcgcgcagccccgggagaccccaagccctccggagctcccggctcctgcggccctggtcgcctgggaggaagacgaggcgggcgggactcgccctgccccatcaccttcatcggctgggcgcacggaggcgggcggcttccggccgcacaggggcctgctcctgcggaaaccgctttcggcggcggcgctctccctccaggacagccccaggatcaccgcgcccgagcgggaacaccgctcgcccacccgcccgtccgcccgcccgtccgcccgcctgcccgcctcgggctcccctttcctccccgcacgcttgaccccgcccctccgcccggcgactccctgattggctgtgcggactgcgggggcgtgccgcgattggtccgcgggccgtcaccccgcgatgcgctgggggcggggcctgccggcggggagccccacggccccggagcggcgcgcgcagctccactgagcgcctggcgtggcgggcgagcgctcctccgtgccgggtgggagcgtggagccggccgggcgcgtagcgggggcggggcggggagccgggaggcatggcgcggcccgacgacgaggaggggccggccgcggcgcccgggcacccgctggccaagggtaccttccggtgctgaggggcgccccggacggggaggcgcgcgcggagccgcacggcgggcccgaggcggagcacggaggcccggggcccggtcccgcgatcgcggcagccccggacggcggtgcgcggggcccgctggcggcggaggaggagacccaggcccggctgctgccggcggacggcggcgaggacggcccggtgcccaggcgctcggcgcgcacggcgctgtccccgcggcgcttcgcggtgctgctggtcttcagcgcgtactcgctggtgaacgccttccactggatccagtacagcatcatcagcaacgtgttcgagggcttctacggcgtgtcggcgctgcacgtcaactggctgtccatggtgtacatgctggcctacgtgccgctcatcttccccgccacctggctgctggacacgcgcggcctgcggctcaccgcgctgctcggctccggcctcaactgcctgggctcctgggtcaagtgcggcagcgtgcggccgcacctcttctgggtcaccatgctggggcagagcctgtgctccgtggcccaggtcttcatcctgggcttgccctcccgcatcgcctccgtgtggtttggaccgaaggaggtgtccacggcttgcgccaccgcggtgctgggcaatcaggtaaataaagaccgcagcgactgggatgctgccgggcgagcgggcaggcgagcgggcggggccggggcgacgaagcgtgcagacccggcgcctgccccgcgggaaagccgggctggggggtgggggtggctgcaggttgtgcttattcccgggcggcagtgacagacagcagtgacaggtgaggagcacagctctgaggaagggcagccaaggctgccctctggcttacacacacacaggcacgcacggtcacccctgcagagggaaggtgtgcggctctgggaagtttgcttccatgttgtctgtctctgggacagccccgatttaattgtcttagcagtgagcccagcccggtccgtaccgaacaggtgtaagtggatgttcacagtatctgctctggtggaaatcagagacttggcagtgttaccgagctcagttattagctcgtaacagtcagtcagtggaaggcaaatcgctgatcgtggaacggttggtggtttcgttagccaaggctcccttaagaaataacctcgtagggaggtgacggtgcacgcctttgctcccagcactcgggaggcagaggcaggcggatctctgtgagttccaggccagcctggtctccagagcgagtgccaggacagcctccaaacccacagagaaaccctgtctcgaacaccccaccccaataaaaattgaccttgtttcccccaccatcataaatttaaatgccactagaattccagaagcaatactaggctaaaggtctgttttttgtatgtgtgggcacacactcgagcacgatttatttttttatttatttagaaatagtgtttctttcactctggggagctgtcctggaattcactgtatactcctggcaggcttcaaactcttgagcctcccaaacacaggaatgagccaccacactagtttgtatttattaatttcaggctagttctcttattgtaatttaagttcgtagtagagggcactgtaacaccagtaaaagttaccattgtaaaggatatttagtattcatccagttgaaagaaatctagtttaaaaaataatccataccccttgttatacatatattgctacatgctgctatgtaaccagaaaatgttactttcttacttcaagtctcatttgggtcaacatcgtggtctaaaatacccccaaaaaactgaatgtgtgtgcttattttgtcagatttacttactttctctaaaaatgcagaagaaagggtcacttaaactgtaattgctgtgtattcaaaatgatttattactgatacctgagtggttgttgctttatatttggattgcggatgttttcctaagatatttttgtttctaaattacattcaagattaatgcttcattgatcataacaaaaatattatcaactccatatctaccaagcatcaattttatggataataaatggaaacatttacttataggtgggcttccccttgtcaggacatttctgggtcttcctcttctctcctggttttcattccttccttagctcctgtaactgtacagttgttcattacaacaaaacatgcatttccagccccagttatggagtggtcatgcatacttatattcagaagcatcatacagtcactaagagcttggtgtcgttacagtgatctctgtgcatgtgtcatccagcttaacattgtaaggttaggagctgtcagcttccccacttgatagataaagaaatcgaaacttgaaagaatggaatcattttccaaaggtaaaagtgtgtctggttcctgatcagcagctctttcttaaacctttcaggtctctagagagaacttttgaaaatacagtggtttcccagagtacttcagtgtttactgtgaattacaaaacctttctaatgtgtcaccacatatatgaatttgtctatgctgaacattttatataggtgaaatcatataatgtgtattttttgtatgactcagttctctgtttcaaagtccatgatacagactatctcaggacttcattctttcttgtagatgaatatactttagtatgtgaacatgccagatgaaaacctaggttattaccatgttttgggtctgtgaatgaggttgctgtgagtgtttgtgtatagtttatttgaccatctgattttagtttgggggcatgtacctacaagtggaaattaaacatcatttcagttctgtgttaaatctatgaagaaattaccaaactgtgtccatagtggctatatcattttacatttgtacctacagtctacaagggctccagtttctcccattcttgtgaacacttcttttctgttttctttttgttttttgagacagggtttctttgtgtaacaacactggctgtcctggaactcactgtgtagaccaggctggtctcgaactcccagagatctgcctgcctctgcctcccaaatgctgggattaaaggctgtgtgccaccaccacctggtgtaaatacttattttctgttactgtaatcatactcatcctagtggatataagatggagtatcattgtaattttgatttgtatttcccttaacaacaaggtgttgacacttttccccatgttctttttagctgtttgtgtgtcttctttggaaaaacaaacgtcttttcacctttttgctgttgggttataaaagttctttattctgcatgcaagttcctcatcaaatatgatttggaaatattttccccatgttgtttttttaatgccttatcagatataggggagaggtttggcaagttttccctttacaaaagtaaaggtaacattagaatgggttttttagggtttacagagcatctctaaacttactactctttctctttatgttctgttagatgcaacatatactctttatttcctattaatagctgctaatgggactgtttattttacagcttggagctgcagttggctttttgttgccacctgttttagtgcccaacacacagaatgatacagaccttctggtttataacatcaacaccatgttttatggaacagcatttatctccacgtttttattttttttaacagcaattggtaagtgaattgtttgtcctaaggcttagataaatgcatgacaaatatttgagaataactaaccctgcaaagttttgctgatggtgtctccaatgctgtttgttttgttcttgccatgcaatgtctcgcccaggtactgaacggaacagctctagggatatgcgatggtaactccatgttttgttttgttttttaaacattctaaagggtctgaagactaatcaatcccatttgcctttttactaactcaacttggcaagtgctcacttcagacgcgctgcctggcttcccgcccatattcatgtgtgtggtgtgcatcttgtacttaccaagcctgcagctagttcccgtcatgctttgaaatgacgcaaatgggctaccaccttccccttcataggaaattcccctagggatccccagtttaagattaactgggtctgaaattgttgacctgtgaatgagcctgggcagcatgagctgttcagaatttcaaactgtggcaactgtctgcttgttaggccacttcagcaaagcccggctgccatcatccgtccctgagtcctctcgtctgggcctgtcttttgaaggagtcagtcagagtcagctgcaagcagccatcaccagcttggaagaagctttgggaaggtctgctttttttttttttttttttttttttttttttttttttttttagtttgtttttaaggggaagcaattttgattttaggggagaagataggcaaggtatatctaaaatgcattgctgttgctgtaactggagtagtgcctgagttagacactcagtatctctttaggctttagatttacatattaaacttttaccttgctatgattattaatattttgtgatctccagatatgaagtttgcgttttcagagaaatatctgccgattacctgggtaggtgagctgcaggatcaggtataggaagctcaacccacatctgtagttgccctttcgataatgaacggaatgttctctcagtggcatctgaagtatgccagtgagtgtggttggcttctcaatctttatctttgcagttagccggggagtggcatatttgtactgtgcacactgctgaaagggcaagtttttcttgtactgttagtattttaacaaagttttaaaagaaatctatactggtgagcctcttaaatctgcttttccggttggtgtatttcgctcccttgacgaggcgggaaatactgcttctatacactccagagaaatgggtcttgtgcttacagtaggtttaagtacaaaatgtctttcaaccatttattgaatcttcagttaagttgaacttctcttcacagacatgaatgattaattacataagacatcttcataaatagaaagactggagaggtggctcttgcagaggacccagaatctgttcccagcacccgtgtcattgggtggctcacagcatcctgtaattccagctacagggaggggatttgacttctatttctgacctctgtatgcactgcaatcacatgaacaaaacccaagacacacatacacaaggagttaaaagttaaaatgtctttaattaatcgtcaatggaaagacagctcagaggtgaagagcactcctgcacttgttgctgttgtagagaaccaggttcagttcccagcatgcacatgtagctagctagctatctcacagccacttgtaactccagctccagagaatctgatgccctcttctgagctccatggacaccagacattaatggtgtacataaaaacatgcaggcaaatcactcatacacataaaataagtctaaaataaaaataaaattttaaaaaatatctctagttgaagtttttttttacatgatatgtatatctatataaaaactattacaagtaggtttttgagttttcaaagacaggagaaagaacaatagaataggtatgactattggtttattatcatttgtagtttgagaaattaaagattgaactatttatatatctaattaattattgatgtacttgtggcttatgggttgaaagtggaaatagaactggaggtgtagaaacaatggaataagaagggcttgttttcagtctgtcttagtgtcctacgtttttagtcttataactctagacacagtataaaagcaacctaaaattaatcacggtggctggaggatcaggagtccaaggttctccttggctacaggaaaccctgtctcaaaaaaaaaaaaaaaaaaaaaagcaagagactattattattgtttggaaattgtggcattaaatagaaaggcaacttgtgtcatcgtcagatatatttgctgaggaagaaaactgaatttgcaaattcttgcttgaggtgtcttatttactaaaagagatgagcttacagccttctaaattctactgataattacttaaaagttcaaccaaatccatgttaatttatgtctatacttagcagtttttagtaacatgacacattaaacttgaattcatcagtctccctcaaagacttccttaaagattcaccttgtgtggccttccttgtccttgaggggtgtgtatgtggatggaacctgctgggaatcctagcaactgaccctacccttccactgaatccacacgaattccttattcttggagaatctcgcctctcatttgtgaggcagacgtgcaccaaaacgtgggaggatgcacaccacgtgttggttcttatgcctcaagattctttaccagcactcaggaggcagagacaggtggatctctgtgagttcgaggccagcctggtctacagagcgggttccaggacagccagagcttcatgtagcactgagtctgcccctctaatgttgtgtagccagtgggtacagaagtctgcccttctaacggtacatcattggtaggtacgggttacatttgccaagagatagttcatctctctggaactagaggatgatacttataactgaatggagctaaagactggtggggatggtttttaatttatgtaagttttaatccacatctggttcattttgatttgttttgccatagtaaattaaaaccttggaaagatatttaagatttactggagactcatggctacatttatttatagtctgaaaccttgatttactactgtgaaaatttcgtattacctatgctaacaaaaagaaatatatctcctacccaactaggctacagagagactggcaggacagacacgaggcctcctaacagtgcaaggatcagatagggagaaaggaagaggaagaattgcagcagctaaagttttgtgtccaccaggctccaatgtaaggatgctacaaataagtacctatgagttctgtccctcctgaactagttctgagctctggaatagatgtatatatacttagtttggttttagtcacatcataattttttccaacaaaaacttcaattttttatttttaatcagcaaatagagagatgactcaacattttgtgggcgttagaaggattgccactcccccgtaactcttagatatgtctgtgtatttgggaatgtccaggaatttctgtgtttaaagtctcatattccatcctggagattctgcttattaaaatttgtatagagtctcaaaatcagtattaattttaaatttccaatcagaggcatcagccctaacccacttcaaattgcaagtaaagtaggcctcttccaaccaagaagaacttgctgtgaaagggagaagagaaaaggggaaatgatgacagggaggaggggcggggctctgttgggtaacggtttctctgagagaagaggagggaggtggagggaaacacagaattacactcctttagaaaacatgacgtcacccatgtgcttctctcctactttttgactttacctgtgaattctaaattacatttttcatgaatttgctgatgtgtacatctggggtctctggtaatagagacatgggaaggtcactgaatccaagcattccgctctcccaagggactgaatttagaagtcaaatccttgatatagtaaacattgatcttgattatagaaatggagttatcagtgggcaaaggtatctcattgccagtagtttttcagttcaaatgaattagccagatctctgagttttacttcagagagctaaaaggaaaatgccaaactattcttcacttagaagtcagtgaagataaaaaaaaaaaaaaaaaaaaaacagaaaacaaaaaaaaaaactttgccataaaagactttgactacctcactacttctaaactagattctctcctctcactaagaaaggagatatttaatcgtgtgtagtgtgtaggtgtaatatatgtacattagtcatgtatgatccttttcacacatgttcccagtgttcacggaaaagcctctgctgccaccaagtcaggctcaggcagctctgcgagacagccctcctgtggagtactcctacaagatttccatatggaacctgttcagaaacatcccctttgttctgctgctgctcagttatggtaagtggcattgtgctcactggtgaccatgtacactgaatttttcttttctttcttttgttttttccggagacagggtttctctgtggctttggaggctgtcctggcactcgctctggttgaccaggctggtctcaaactcacagagatccgcctgcctctgcctcccgagtgctgggactaaaggcgtgtgccgccaccgccaccgccacccgtcttcatgtacactgattgattgattgattgattgagcactatggattcttttattgaaattagtggcttgaacattagtgaggtcgattcatgcactccatagcataatcatgaacttaagtgtggagctaaaggcaaaagcacctaaaggggtttttgtttttcttctatgtttttaaaataataataataaaaaaggagatctcggaagtactatatgctttttgaatcctggtgcagtgttacatctagaatgtagaagttctacttgcagatatatttagagaaacctaccctgtgtttaggagtcaaatcttaatatcaattgcagtctcactttaaatattgaaaacctggggggaaggttgtgaaatgcatattgataagacaacaggtaactgaattgaaatacattcacactatggactattacatagtagagaaaaccaatgaactagaatacaaagtgtcactatgaaccacaagacaaacagttgagtggttagaccaagttatagatgaacactatttataaagtttatatgcagaataattctaattattcatgaagacacatatgaaactaaaaactccaagatcaaaataggagtacttttggaaaagaaagcatagaagagggaaattaacctgaagcaaagatggcactgaggtaacacctgacaaagatcagtgacgagagagtatattattcactgtggtctgtgcgtgcttgaacactttacagtaaacgaggatgacataataagtttaaatctcagctatattaccaatccagtgccttcgacagagggcacaccagggtttgagactttgagacggcacattcctgaaaaccagctgtgtacattcttctctgtgttcttttattctctcatgaattgccatataagcctttgcttcaagcgtaaggtctctgagacaagcattctgttacgttttaatgatatttttttgttttttgttttccttaaggggttgtttgtttgttgtttagtggggtgtggtgctgggaaccaaaccaagggcttatgcataccaggcaaaccctgtcattgagccctgctgcactttgagcaccactggctgtagctcgtgatacttgacagtaaatgttggcttgagtggtgccatatgcagagttacgtgtgcagacatgatttctgatccacatgcctgaatcaaaataatgtaacaaaatcctagtttccgtttctgctgctacaacaaaatgtccagtgttggatattctataaagaaaagaggtgtgtatctttgaaaagttcaagacgacgtcgtcccatctgctcagtcgctgctgaggaatccttgggagcatgatgacaggggtaaaatacgactttgtgccagggaggccaagctgtttagtgacctcagctaataacagactcactccatgagacctaaatgaatctttctgaggagcccctgggcctcatctccttgttctaggccccacctcttgacggtttcatcgactttgccctgcccatggggaaattccagcacggatctctcgtaaacatagtgttccatccatctgtccattttgtgaaaggctacagtggtggtgtttgctcttcttgatggtctgagaacattacatatcatgcatattacacattatacacattacacattatacacattacacattatacatattatacattatacattatacacattacacattatacacattacacattatacatattacacattatacatattacacattatacatgttacacattatacatgttacacattatacatattacacattatacatattacgtagtgctccttattgtttcatagaatgatgaacttacttcttttcctcataggtattatgactggagcattttattcagtttcaacattattaaatcaaatgattttgacatattatgaggtaagttttgtttgttttgctttctgagacagaggttttaatggaacactggcgtgtttggaactcattatatagaccaggctaacctagaacttgaaatgacttttctgcctctgtctccccaatgctgggattacaggcatgtgccaccatgcctgtcaagcttctgtttttaaattgtatgcttgacccagactttgtctttaacagtatagtataatttgccttagggtccttgttgatgtaaaagactgatgtctgtgttttaaaaggcagcattccatccacagctaagagagagaaaaagctgaagaaagcagactcaggatacaaaaggcagaatgggtctcacagttagaggggccagattcctgagttgtcggtgtgatgcctggcacatcacaccgttctcatttgctctggtcccctggacttagtgtgtaagtgcaatccaaaattactatctcccatactttttattaagcctatttaacctaatttgcaaaacacacattgaaagtaaagattattagcattgtggcaaaccttaatttggttatatggaaaaacacaaaaccttgtaagggatgtaagcttaaatgtcaaggttagactggcctctctcttaaaaaggagctggcacttctactatgtaaaagtgttgccctttactctctgtttgcacatgtataaatgttttcagagtcttaacgaaaagtaagtacaaccacggagtacccagaaaatgtttccttttttatttattattttataatcatttttgttgttgctgttgttttaaaataccttcaataaaccaccctctccaaaaacaaaactgtagcccatgtagggaatctttctattgtgtgcttaattttatgtgattatttccagtaaccatgtaaatggataggaatatgaaccaccattttgaattagaaatatctgattgtcaaattgttttagggagaagaggttaacgctggaaggattgggctaacactggtggtagctggaatggtgggctctattctttgcggcttatggctggattacaccaaaacctacaagtaagttgcagtaggtctgtgcatggtacataagtgaagatatattgactttaaagaatgggtttcactaggtagctcaggcttgtttggagctcatcatcctgcttcagctgcccaactgccaggatgacagcattgtaccaccacatctgcctaaggctagggaggcagtgtttcaatggtctacctacatgaatgctttacaaaccttcctaccgctttgtaggttgtttctagctaaaaagagccctcctgaggaagcgccaggttccagacagactttatcttgtctttttaaacgtaaaaaaaaaaaaaatgttattttctatggaaagattattgttgagctagctacattatccacagataagaaagagtggtttccatttttctctgtgccctaggaaaatcagagggaaactattaataattttgtctttgttttagacagacaactctgatagtgtacattttgtctttcgttggaatgctcatatttaccttcacgctggaccttcagtacatctctgttgtgttcgttactggtgggatccttgggtaagtgtcaggtgtgtagaagaaataacacctgcccccatgattctgaaggagcatgcaaaaggccctccaaaagttctttagatattttgtactctaaaagttccattatttacttatgaatgtacaattccttagaactataacaaaaatgtttggccaggcagtggtggcgcacgcctttaatcccagcacacggaaagtagagacaggtggatttctgtgagttcgaagccagcctggtctacagcgtgagttccaggacagggttcaaagctatacagagaaaccctgtgtcaaaaaaaaaaaaaaaaaaaaaaaaagttaactattttggtatgcctttggtgaaaaatagatgagccttatcagccaaagtggctgcccctgtcataacccagtaccttgtggtcttgctcttctagcttcttcatgactggctacctccctctgggctttgagtttgctgttgagatcacttaccctgagtctgagggcacgtcctctgggctcctcaatgcagccgcacaggtaatcctccctctgcttcatcttagccacattgggggcggcaattccaagcactaggtagacagatgcaggaggaccaggattccaaggccagtgttagctgtgtaatgtgtttgaggctaggctggctacatgagactttgtctcaaaaaaaagagcaaacaaaatcacagaaagcaaggtgattcctatggtcagggagcagtgagcttggcctgactttgtggtttaataatcctgattttcagtggttgtttctagaagcccagtcataaggaaaggcggttaaggagggttctggggaggggggtgtccttgttttcaaacagcaaacttaacaaaagtgatttcacggattttactttagatatttgggatttggttcacattggctcaaggaaagctcatgtcagactatgaccccatggcaggaaacattttcctctgtgcctggatgttcttgggcatcatactgacaggtgagtgctgagtgtgctgcctgtattccgttctgggccgtgctgtttcatggcgttgcagaagttaagaatgagaataagaagcagagcacagttttcctcttagggtgtgagtctgtcctttcattttggcgattccaaatttaataccattactctgcataaaagacagttctggggctggagagatggctcagcagacccaggtttaattcccagcactcaaagggtagctcccaagagtctaactctagttccagagaatggaatgccctcttctggcctcctggtactgcacagacataaatgcaggccatacactcatatatgtaaaataaaataatcctaagaacttataaaaactgtataaattacttaacttgtgtgtaagttgtcttatcaccttcttcttggacgcgggcatctcaaacctccgtattcagagccgaattcactgtgttcctgtttcagttagtactgtggtccatgcagccgaccacacgaggacattctaaagtcaccactctccttcccttactacagccccgccccacacgctgtattcgctagctgaggggtctcctcagctgcagctgtggggctgaccatcccagcgtgaccaccgtgtgttacatgttatggtagaaaaggagacagtgaccaggttgtgtaactctcggtgcttgtgtttcagcgttgatcaagtctgacctgagaaggcacaacataaacatgggactcacgaacggcgacattaaagctgtgagtagcattttaatggcttgactctgactttacagggtaaatgggaaaccattcttgtttaatcagtaacttttttttttgttgagtcaacaattaactgttagacagtcctcgattggctgttagaccgtcaacaattgttagacagtcagcgattggctgttagattccatgtcaggtgtgatacatcccttcagtgtcaattatttctacaggtgacagttgacagtctgatggatcagaaaccgagagtggtgatgctgtccaagcagtcagaatcctcactctgaagagagcacagcacctggccctcagcatagggtgtggctgcatcctagggagccgtgtgagcggtgaggacgcttacgtggaaattatgggctcaactctgaatattattttgttttattgttgcttacatcgtgttaacactaccgtcatctaatgccattattttcagttgtgtgttgtgtctatgaaaacattcctgacttttttcaggatgttttgttttttatggggctctagttcccataagacacataagactatgcagttcctacataagcatgcccaatgcgtttccagttagctgtcgtatcactgtgctgaccgtggcagacatcacagtgtgagcactgaacaccatctggaggccccaactcgcttgaggacagggctgggatcgggattccagaggagccctcagatttccccatcgtgtgtgctcttgttatacagtgcggtgacacattctgttccacacaaaacaatagttgaatacacagattaaatctgttacactctggtgagctaaggggtgaggcccacaaagatcggctggagttcctccctgtgctgccttcatacagacaaatggtaatcctgtatttttcagtgcagcttgaaatagaatagttttccacccattgtctatttactccctttcaagaaaatgtcatcatctgtgttaaggatagctaatggtttcttgcatcacatctgtgtttcctttggcaatacctaagataaggagtctgtgataacgtcagagagcccacgtgtctccattctgtggagagcccttgaaatactggctgctgtgtttctcttgagagttgtcacgtgttctgtgagtgctgggaacaggctctcctccaccacagagtgcatgtcgtcaccactctgtggacatggtctctctttttacatgctcagggcaaggagaatgggcccaagtgagttttcacagtgcctaccactgtgtcttgtttacagtgagaattaattgtcattgatgttctgacattttattgacaataatatttaaatagtgtaattttgtaaattttatgaaaaatttacataatatcaaaatgcacacagaaaagccaatcatgtaatgaatatgcttgaagcagatgtatctttgatttatgcaaaatatgcattgatttattttgatattctgtttcatcaaattgctatgagctatgtggaatctgacactggaaaatgtactaggaaaactttatatcactcaggattgggaattctgagtccttggtgtgtttctatcatggtaaccctggacacatcatttaacctctctggaagcattttcatgatccatgaaataaatgctttcactgtgatccaaaacaatggttttcggggagtagaacaacccttttgcagggactgcatatcagatatttatattacgatttatagcagtagcaaacttacagttatgaagtaggaacgaaataagttttatggttagggggtcaccacaaccttaaggaactgtgttaaaagagtcgcagcattaggaaggttgagaaccactgatctaaaagatgttttgctgggcagcggtagctcacacctttaatcccagcacttgggaggtagaggcaggtgggtctctgtgagttcgaggtcagcctggtctacaaagtgagttctaggacaaccagagctacacagagaaaccctgtcttgaaaaagtaaaaacaaacaaataaaaaaaatcttttagaaataatgtcattcaaaatggaatagaccaaatcactggagcacaggaacttaggactctagctagagaagagctccatggacaatggagcacacagtgtgactgctcctgtgtacacacagggaacttttaaccttgctagtcagtctgcggtagttcaggcagagtctgtgtaatcagtaacttcttttgatatttatgtcacaggttgaaaacaaccaaaaatacagtctcccccgactgtttctatttttaaattgacagtgctgtttacaacaatcttgtacttgttgattgatttcctgaaaatcacagatgaaagttgggatacttaatgcttgaaaagcatatgtgtgcactgtttgtcactgtttggaaaagggataaaatatgatgtaatagtgcaaaataaactaatggtgttctcagtattttaagagaatgttatggataatatatcaggtgagaatttgatataattttgtgtcatggttttattagtagtaattgtcacctgtgtcaattttaatcagatgattttaggaacaaaactagatggcctcagaagctgatgcatttgtaagatgttatgaacatagcttttgtcttttgagaatgttggagaaatgtcttgtgtgaaaatgtttgtgttaataacttggacagcccctgtgtctgatgtcttcattcctgttcttatttttgctatttttataatttccttatgtgcttgttcctcattatttcatacttgaaataaatttatttttttaatgctactcttgtatgtcttttaaaaatgagttctggtgcctggtatatgtggtaagttagaaagtgattatatgattttacagtgaaccaccgagaaacaagtccactgtgaccagcactctgaagaaaataaaatattttatttacttaaaaataatgtaagagggggctggagagatggctcagaggttaagagcaccgactgctcttccaaaggtcctgagttcaattcccagcaaccacatggtggctcacaaccatctgttatgagatctggtgccctcttctggtgtgcagatatacatggaagcagaatgttgtatacataataaataaatacaatctttaaaaataaataaaaagtaataataataataatgatgatgtaagagtagactgggacagtggcctcactgaggacttgagttttgttgctaacatcctcatcaggtcacaaccgtcccagggatccagcgccctcttgtggtttccatgggcaactgcactcacgtgtatatgcccccacacatgtgcataatttaaataataaaaacaaatgtaacaagaatcctaacagcttagagaggctgacttcagcaagacaacagagcattatccttagaagcgtcatttctcacactcctcatgggtggcgcttttgttggggagccagaaatccagtgaagcggtttcagcacagacaaacaggaaacctctgaacggacacactgaagaaggtaagacaagttcattttaaccacataccctcacccagagtggcacatcagggtgccaggaaagactccatcagagagcacagagagaacactcacttcatcacctttgtagaaagctccgccttctaactggcccaaccaggatagtgagtgaccagtgtagctgaatgtcggagaaggctggaagcagagaagaaagacagggagccttcagcccactccagacttcatcaggaagccacttgggatgcctcacctgtggacctcgggcatcccattactatgtatgccattcccttgatcagtcaggctggctccccagtcatgtccacatggatagtggctacaagtatcttgggcagatagttgctcaacttgacggtgctagaaggcacccagactagggaaagcaaacaggaagctaacgacaccttgcctggcttttcaggatggagaactgacgggacaggtgtgaggagcaggtaggtccatagcaaatgtctgaggctcagaggccctggcaaggctcatctgtgcattctctccttaaaggcagttagtgtagcctggagaggagccagaaacatggctcagtgcttaaggtgccctctgcctccaagcctggaaacccgtgtaagattgctccccaggatccatggtcagaggagagaactgactcacacccaagttagcccctgactgccacacatgatctgtagcatgcctgaaccagcatgtctgtgtacacatacacagaggctcaaacacaaacttaaaaaataaaatacttaaaaacaattaatctagaggaggtgtagtttcttagacttactcggtagtgaaagacttggaaacaaaaccaaagctgggtgtatgtgatagatagctcatgcctgcctgccccacattgcagaggcagtaagagcaagtttcagggccaccttcaactttgtagtgagcttgaggccagcctgggctacatgagaccctgtctcagaaacttaatgtttattttaaataaaatttaaaacaagggctggagagatggctcagaggttaagagcaccgactgttcttccagaggtcctgagttcaattcccagcaaccacatggtggcttacaaccatctgttatgagatctggtgccctcttctggaagcagaatattgtatacataataaataaataattttttttttttagaaaaaacagcttctaagataaaaaggggggaactgtgcccccagtctccacatgatgcattaaaaccatgcactgtttataagaaaaaaatttaaaacaaacctgccaggtgttggtggcacacgcctttagtcccagcagaggcaggtggatctctgagagttggaggccagcctggtctacagagaaagttccaggaaagctacacggagaaaacctttcttgaaaaaccaaataaataaaaataagccaaggaaacatgagaccacaaaagaaaacaataataatccagtaacaaagtccaaagaaattgagtttataaacttcctttcgaggaattgaaatcatttattttgcagtgctgggatcacatccaaaaaaagccattgtcctaagtaaactcagtgtgtggtttgaatgagacatgaccgccataggctcattagtttatttgcacactttgtccccagttgcgggtgctatgtggacgttacgtaagctctaggagtcgactctttctgaagggagtacgtgttaagggtttagagtcttgaccccgtatctgtactctgtgaggatgaaaatgtgatccgacagcttcccattgctgctgccatgctctccctgactgctgcctttacaccacgatagaatctgttcctacagaaccgcaagcctttgaataccataaacccaactcactgggctgtgctaatataaaaaagcttgggaaaccgtaaagctgaggactgcatggaggctcagctcatgagatcccagagggaatgagagcttcctagaatttagactagagcctgcattcttcgggtaacctgagaatttgcctaaggctaaataatacacacacacacacacacacacacacacacgagtgtgtattctcagctaataaaatatactagaaataaaaatgtagccaggtggtggcacacacatttagtcccagcactcaggaggcagaggcaggcagatctctgtgagttgaaggccagcctggtctacaaagtgaattctgggactgtttcagagaaaccctctttaaaaaaagcaaaaataaaataaaataaaaataaataaaaaggggctggagagatggcttagaggttaagagcactggctccttttctggagggactgagttcaattcccagcaaccacagggtggtttacaaccatctgtagtgagatctggtgccctcttctggcctgcaggaataatgcaggcaaaaggctgtatacataaaaaataaatcttttttaaaaatgtttttaaattttttaaagatttatttatttactatgtatgcagaagaggcatcagatctcattagggatggctgtgagtcaccatgtgggtactgggaattgaactcaggacctctggaagagcagccagtgctcttaacctctgagccatcgctccagccccaataaataaatctcaaaaataaataaatacataaataaataggtagtgtactttgtttggcagaggagattccaaaagagcatagcactgaacctctgtcatggatattactaattattcttatgcaggttcacaatgaaaaaggaacaaaggaagacaaaaaattgaaaaatgtagttggagagaaaggcactaggactcttaggattccagtcagtcacacactggaggggcctgggatggggaaagggattaacattaaagaatcctcctgtcctgctcagtagtgaagctgtccaaggtcaagaccacgcccagctaagccccaccccttgtaggaattgcttgctcccagaaagcaactgtctaagcaagttttcacctgcttcaacgtgcagcagctgtggcagctgtggtctaagggacagcaatagagcagaatttaaaaatgaaattagaagcaaaactgcctatgtcagggcttccccaggtcagcaaacagggcgtgacgaggctatgggtcagtgctgccacatgaagtctttggacggcagtagaattttgtggtgctgttcgtgtggtactggttttataggtataaaaaaaatccaagattgaaggggagtcatggagtcacgtgtaaaggttccaaaaagccactgaagcgagaccatgtgtggcagactcagttggaggccacgtgaggggagcctgagaggccactgcatgaaactcaaggtgaagcctaggctgtagtggggcttctgagaagaaaagccgtaggcagggtggagtagagcccaagagagaggcagagctccccaagtcctttgactccagatgattccattgctagccccagatgccagacatagagagagcctcaggatttggtgtttccccttctgggttgtgaatgaaaaaaagaggggggggagagagaggaaatggcatggctgctcctagttacggtgcaggagaaagtttattgtaaataaaaggaaagagcatagccagggacagggacatggggagagtccagagtggacatgacccgactgtgcctctgggagcataagcgagagaaagctggctgagggtatgattcaccactgtctgcccctcggctgctgatacagtgtgaccagctagctaccttatgctcatcataacaggactgccacgatggcctgtacctcaaacccagccaaaataaaacccctgccccttaagttgcttttttcagggccttttgtcattgcaacaggaaaagtaactaagatgtaaaattggtaccaggagaggggttcctgggatgaatctaacagtgtggtcttttggaactggtttggggggcggtatagaagagtttgggacttcaggctaaaaaataaaagtcccttgagtgctgaaaacattttgttgctgtgtttttgtggtgggggttggaaggaaagctagaaggccaagagaaatgcaggcagtggttcacgagagttcaaagaggaataaggattatacgaggcacaattcttggtacattctgtcaaggaatttagctttgttccgcccatgccctgaaattttgtgtccggctcaatcaaagtataatggattcattttttggcagcggaaacttccagagcagagagcaatcaagctatggcctggtttctgtttactactcttgtccagaagtaaaactctgggcatttcttacagaaatgtaagaaaaatatgcagtttggtgaggaaaagagaaagtttaaagttgcaaccactatggatgataaacaagaggctgtaattgttaagggtcaaccttctactctgcactgggacaagcaggccccaagggaagacccctcatctaaggctgcaactcgtgaatatacaaattcatgtttaaagagagataagcttcgagtgtgggaggggttccctactccaggaaagcaactgtccaggaaagtgcctccccactgcccccgagaaagcacacacagagtacctcaaccggtcccacgtggaccaggctccatcacaagatggcaacagaacttggcaacattgtccccttgttactctaggtcccgcccccccagcatgagagactcaagagtaagaaggtcacaggtgttactcctgcagaggccaggcaatgctcctcagagctgtaatccctgcaaggaggccaagagaggccattcggtgaaaatggtgaagcccaagtagcaaaggaggttgcaaatgtcggagatgccaaagccatggcacataccctgcgggaagatgcatgcaggaagtggagccctctctctctctctctctctctctctctctctctctctctctctctcggctttgtgtgctgaaggcagccagactggcaccgaaagggccaacatcgatcctctgggggccagatgattccctcacaagccccagctgctacacacggagacctgggacaatcctctctggcattttgttgaaactgactgctacacatgagtgtaacagttgacaccgtgagttagaggtcgctccctgatgccgtgtgccatgtcaccgcactgctacagctgctgcttaaacatccctgagtgtcccataacatgcagtagaaaaagcacagctcacgaagcctaaagtcttgaaacctgattggttaggggagttaatttggaaaaatcttggaatttaaaccctctcagttttcacttttttttaaaattaatagttaataagttgtgagggttttaagttttgagcagaaggcctctcagtgactctgacctactatggttcttgtggcaaaatggccctaataagaacttgtggattcccacatgtgagaagcaggctggctgatttgggagcacatggtactgtggtatctgagtttgatcttgtttatagcagctgctgataaactgacatgcactgttccgcgtgcgtgtgagtgcagaggcaggtgtcaacagagcacacagaacaaattcagaagactcggtggccagaggacctggaccgcaaaggagcacagctcagttgctcctctagtcaggaaaaatggttcttatgtttgttgcacaacctacaatgcagggctaaagaacaaacagaagccaggcatggtggtgcacacctttaatcccagcacttagaggtagaggtagggggatctctatgagttcaaggccatcctggtctatatagcaagttccaggccaaccaagactacatagtgagaccatatcttaaacaaaaccaaacaaaacaaaggaaaaaacctagaaggaaagcccagactagaccacgcccagactagaccacgcccacacatgcaacactttctgcaagtataaagcagcttgtgtatttaacataaacattttctgtaggcctatctggcctttcatccattatttaaatgaccacatactagtccaatgggctgaaataatagcataaaataattcatgctgtctgcatgtggatatctgctcactgggttattcagctcctcagtgacggtctctctggtacacttgttactgcacaaaccactgtgcctttccctgtgtaagaagtaagaatgtaatgttagaatccagaccataatagccaaagcagcccttcctctctcacaggtgtgtacagacagcctcctgaaggcactctgtgaatacctaggtaacagatgtccaggtaccaggatctttcccctgggacattgatggccactcaccctgctccccatctttccgggctgcaggcttgctctataaaacctccccacacatcgacctcaagggccctggttcctctcctcagagcccctgccatactgccgtctgtctgtctgcccctgacactgataacacttctaataaactcttcactcccaacaattcatctcagtggccctcctgacctcgcccctgagatatgtcttaaagcaaaacagaacacaataaagacctttgctcaaatttctgtctcaaatttcccatgtcggtaacatgggaaaggcagacaacagcttccaatgtgatccgggttatcagtgtgggccaaagctccgaaagagagcccgccatgcagtaggagatggcgaggccagactctcgttggatctgaaatcgatctgtcaggcatgcggctacatacaacttttccagggcagaaaagctctgcctgaagagcctgggagccatcttcacttcagcaactgggaaagcacaccctctactggtcatcttatgaactgtttgaggagagcgaaaagcagacccaactttctgtcctacctggtccctcagcctttagtcccaaataaacacacagaggctgatattaattataaaccgtttgtcctattgctcagtcttattactaacaaacccttacaacttaaattaacccattattcttatccatgtttagccacgtggctttgtaccttttctcagagagtcattcttgccttgcttcctctgcgtcaggctggagactccatctctgccttcctcctcccagaattctcctagtctgggagccccgcctacactgcctgcctggctactgaccaatcagcgttttattaaaccaacacgagtgacaagtgtttacagtgaacaagagcgtcatcccacaccagagaagtacattgaggtaaagagagaaaggcgaagctataggactgtaaattaaggcaagccgcggctaaaacttcggagtctctgctgtaggagctagcctgtctgcctcttgtagagtgccttgaaaccacccaggaggctggatggaacggtgctcctggctagcagtctggagaccagttgtggtgctatgtgggttcctttaccacctcaggatcagacgtgctcccggcttggagctggtggtgacctgaggaaccaaatctctacagggtttatccgaggtattatctgtctctcagttcccaggcctaacaagacaactgaaccctggtgtatgcgtctagacagatttctggtaccactatgcccttccttcagacacatgtaacccctaatgcctcttattagataaaagaaagaaataaaaactttggaaggttgagattgtagctcggttggtagagtgactgcctagcatgtgggaaaccctgggcttgatctgcagcagcacagaaactaggcacagtggtgcagttgtaatcttacctatcatttactaggaagaggcagaaagatcagaagttcaaactcatcctagactacaatagtgagttggaggctgggatacatgagacactatcgcaagcttttttttttttttcttttggttactcactgattgtaagtaaccactgggaaaaatcaatgtcctggggacccacttggccacaagatgtatagtcagaaaggcatgaggtcagacactggccacagttctgagagttcctgacagagggcaagtcaggtcactctcgtgctgctcgttggtagacccaacttcaggccagtagcgacagcgtcaggcacagatccatcctggtgtcccacagggacagcttcaagtaggagctggactgacgccagatcctgagggatctgggctggctctcagacacttggctgtgaccggccactggcttttctgcctcctgggaccgaggaggtgcctgctcagattgttccgtggtgctgggcctgtgcagaccctcaagaaagaaggtgacccgagctgtggttttggacagctgcccacggtgccctgaaagctgttcctcttcttcagccaccccagcctccagcctcacagcagggatctgagtcagcgaccagccaagtggaaagaggtggactgtgtgaccttccagtagctatgatgacgaaagcaaagacacactaatgagtctgtaattctgcctgtggggtcttttgagaaggaaaagcccagtgaactgtgtctacctactcccaagtaattttcagagtcctgaaagttacgcttgtcctgccttggatgacagatcaatattgaatctcttcctgtggttttctcatgcccgccgtgaagagagagattttgcacgctcttagtcttaagtctctgtctgtgtgatggactcaggacaccatgggctatctgtagccgagtgtcccagcaggctcatcgggctgggcagcaaagctagggctcctgatagctggattgctccttgctgctttggggaccccatgtatccaataactaccccaatgagaaaggaaacagactaagagacactggcggccctgccttcggctaccagaccactcactgaaacacgggaccctgtcccactccccagattaaagcctccccatggatttcatgcttccagaaaggaaaggccgaagccctggtgctggggaggggcatgagaggtcacagcagctcagccgcaaaagggccacatggtgaccacgactgcttagtcacatggacctcttctcttaaccccatgtcagctccctgaagactggcttggggctgaaaggataaaaaagaaaggcccagtgggtatctttcagtgggcgctactaacctatgcccctcagcaaacatgccacacgcaacagagttagtgcaaaaggtttattgggggaggagtgagtgaaagagtggagaggcaggcagacagacagacagacagacagacagacgacaacagagactgggaaacaagagaaggaagagaggccagagagcgagctgtgcctggtgggcacatgacacatggctgacggtggaaaggcacctggtgacaggtgatgctgagactgctctggtggcaaaggcagaaaatagatcatcacatcacgggacctttcgatttgctgctcttcccagtccacgctgagcaatctcctttctctgcatccccctcctgtgtgtatatctgtccatgcatgtgtgtgtgtgtgtgtgtgctgtgtgcatgtgtacatgttcatctgtccatgcgtgtgtgtgctgtgtgcatgtatacatgctcatctgtccatgcgtgtgtgtgtgtgtgtgtgtgtgtgtgtgtgtgtgtgctgtgtgcatgtgtacatgctcatctgtccatgtgtgtgtgtgtgtgtgtgtgtgtgtgcatgtgtacatgttcatctgtccatgcgtgtgtgtgctgtgtgcatatatacatgcccatctgtccatgcgtgtgtgtgtgtgtgtgtgtgtgtgtgtgtgtgtgtgtgtgtgtgtgtgctgtgtgcatgtgtacatgctcatctgtccatgtgtgtgtgtgtgtgtgtgtgtgtgctgtgtacatgttcatctatctgtccatgtgtgtgtgtgtgcacatgtgaagtcagtgagcagtgccaggtttttcaatgaacctggagtgagctccaagtgttaccagagagaccgagtccccttgggtccatagctttggtaatgaaagtttaaaaactgcccgggaaacatgagaacaaccgtgtagctgtagcgtttaggagaccaacagcggggctggcaggctgcagggaggcgacgtggaggacgaggacagaaacggaggtctgtacgcagctgcacagcagaaggggaggaggggagtccagaggatctgggaaagacagaaatgtagagatggaaaacggaaacccatgtattctgaattaagactcaaagaggacacgctccaagcctcatgggagccccacacggggctgcagaggtgtaagccctgcgagaggccatgagaggcactctgtgcgttgtcttcctgtggctttagggcaatcggctttcctggttggggaggggagcaggttgactcctggcccggtgatcggcaggcccaactggactgagtcttcgaaggaggagagaatagcatgtaatattggaatgacttctggccttggctttagaccgcaaacatctgctctgtctcttactagtggggtgaccttgggctgcatctcaccgtccgccagctgtagtcaggtatgaggtcactaggagtcgccttcagagcagcatgccccacagacactgctttccaggccctcgtgtgccccccctcgtgcactggcaggacaggacacctgtgacaggaatctcacaacttccagcctcccctgagaaaatagagtcattgatggcatgcagacctcctgagtacagaaggcagaaggcaagggagcacgctctctgtctctggtccctgcccactccttgagcccaggtttccacggggatcctagtgacgacagatctgactctgtgaggccatcatagaggcctcttccagccaactgcacttggctcctgagacagaaacacaagttgttcttcccttctggaagcagctttggggtgattggactctagttcagaccttaaaaactaccctctaggcaggcctgcgagcccttcactgggctctggggactcctcacccctacgcagattgatcccagaacccagaggtgggactgtccttccttcctgggcactaggtggcagtaagaaatgcttttctatctgtaccttggtggggatctgtctcttgttttgtgtctttgggcaggttactaacctttctggactgagtgactgtgatctgggccaggactgaatgttttcatttccaaccagttcttgggtaacgtggtgattgctgctcaggcaggagctgacaggcctgcagtctctcccggtttggagtctcacaagaagagtgcccaattctctccagcaatgctcctctgcccacaccaaccaccaccacccaacagccctcaccttcggatcccaaggggatgctctacctaaggcctcagagaccaaacaatcaacctttctccaatacaggagggttcaataacaggcagatgccatatagagagaagagaaaaaagagagaagtaaccggagaaggtcacgaaggaggagtgtctgtcaccccagacaggatggccagtacctctagtactgagttcctgaaataggatgacggaagcccagcagaccaagcggcccctctacactcccgggtgccttttccaggctctgcactgaaaactggcctcaagagccatccacctgactctgctctcatcttctgccatttgggcaggagagcctcagctaccttggaagccacctcttgaagaggatggtatccctggcactataacagatgcttggagcagagcatctccaaaaacgcccataagaaaaaaagtgaagcccatgagattcagtgcctacctgtgacagcacctgccccaccttcattgacaacctctcagaccgggaatgagaaagattccaagtaccagtggttcctctcttgacagtctgtcaccctcactagagcaagcccattccacacccaccatgaactgtttgccttctaagtcgttaagtccttggctccatgttaaaggagttgaaggaggaactgtcaggctctgttaggcagatgtggactgtaggaggactggcctgtgctgtgcttaagatcctgccctggggctccccagtagaggaagattttgatctttacactgtctgtcccccaatcaggccagtcaccggtgacagctgcacttacgatgggaagacacactgtagatttggttaggatcaggaggcagaattcttctggtcctaggattatttgctaaatccaaacattagaggaacacagtgtggatccagcaagaacagatccttcgccgctttaggttggagacatatcagtgtgggggtctcggggtaagtaggtccttacttatctcttttcttgactgtagcctctttctccctcctctttaacctcttggttctgggtctgttccaggagttgaatgctggtgactgactgtactgttggatccttagtacctaacacagctctaggcacatagtaggtgcccaggaaacatctatgtaattaataaatcaggaaaacagcttgctgggattgggagcaagctggtggccacttgagacttccagttcatttaatgttactactctagggatgctgttcagtccctgccttgcctctccagaggatagcctccagggaccctgatcatttccctaaaactgtatggaccacagggctggttgagtcctctagagaccacacaggcttttgggtcccaaacttaactgggtttagaactggggagtgtgaaccccacccctgatgattctgctttcaagcctggatgttggggctttttttctttttctttttctttttctttttctttttcttttaagctccttcagatggttctgttttaaatccgaagtctagcgctagggatctgatccatcattcatttcatagtccaaacctctgagaggggactgggtaaccccttagcggcagagctgagcaccctactcaccaaggaagccgttgtctcctctctctctctctctctctctttctctctctctctctctctcactgacacacacacacacacaccacacactctctctctcacacacatacacacacacactctctctcacacacacactctctctctctcactctctctctctctcacacacacacacacacacacactctctctctcacacacacacactctctctcactctctctctctctctcacacacacacacacactctctctcacacacacacactctctctctctcacactctctctctctctctcactgacacacacacacacacactctctctctctcacacactctctctctctctctctctctcacacacacacacacacacacacacacacacactctctctctctcactctctctctctctcacacacacacacacacacacactctctctcacacacacacactctctctcactctctctctctctctctcacacacacacacactctctctctctctctctctctcacacacacacacacactctctctctctctctctctctctctctctcactctctctctctctctctctcacacacacacacacacccccggcagcttcagcttcactgcctgttagtgcagttgaagacaatggctttgattccatccctcaatcttccggaggtttcagttttaattcagcagagaacgcatgcagccttcctctggtcttcggccttcagctatacgcagtcctgactttacaggcactgtgctctgatttgctcagtgtcctggggacactctgcacctaccccaacgcctcctgctgccgcccctcctcagccttgctgggttgttcctggcctgccttcttctaccccaactgacctctgcccactcactttcctgctgtccaatccttgacactttgtccctactccccataagctgcacccaaataagatgtggacattcttgacggtcattcccatcttttctgtcttagctggtaagccccctctggctctaccaagagtgccagccccagaagacagacgactccctctcagctggcaaacagcatactgagtcatggctttggaacataagcatgctgttttcatttacaagagagagagaaagagagagagagagagagagagagagagagagagagagagagagaccaccagcacaccccaaaaccaaacaaacaaaaaacaaaaataaaaaccccacactgatgaaggcccctggagaaaaatgaatgatggggagataagaaggtgagatgatgggttcagtaactcccctccccacaccccctgagcttgttgaaggctgttggagagtttggaccctcattagcctcagtaggaatgggagcactggagcttttacacattgtacgtagtagaatgtcaggacatcagtacagggcatcaggctaagtgaatctcccagtccctgtgggctgctttgttcccatcttccagggagaggccactgttgtcacttatgcctgatctttctccaccctccagccctggctccacagatgcctttcagaacctgtccaccctttacccacaggacgtaagtcaaccacagagacattgcatcccttactgcagcagtacaggcagtagtaaaggtatggaatcaggtgaggcacctgcctgtagttgaatgtttttctctgtcccattggtctccctggaccagtttctctcccgctcacaggtctctgcagccacttataaagtaatcactcagaaactaatagtaaatataattgtttggcaagtggctcaggcttattactggctagctctctcttattaattgaccctttttaaataatctgtttatcaccacgtggcagtggcttactagtaatgttctggcatctcacccccatcagtggctgcatggcgtctccccaaatccaccttctttctctctcatctgtttggatttcctgcctagatattttctgctctgtcttaggccaaaacagttttattcatcaaccaataaaagcaacacatatttgtaacgtacagacagtccttccacatcactgcatggcagaagattgggtcaagggaatgtggtggatgcacacatggagttttattctgctatacagaagaatggcattgtgacatttgcaggaaaatggatgcaactggggaccctcgtagttagcagaagagctcagaatcacaaggacaaatgccaagtttactctgacttgtggatcctggattttacatagatagataaaagcagtttcatatatgatggaaatgtaagtggagtagtctggggaggaaggggaaccactgggaaggccgcaggggagaggggtgggatgtggtaggtgtggtcaaggtatgcaatcctctgagaaagtctgtgtataacccacagctgtgtacttaatagataaaaacttcttttaacattttatttttttaggtgtgtgggtgtttggccttcatgtaagcctgtgcaccgcttttgttcctggtacccatggaggccagaagagggtgttagagtccctggaagtggaattataaaccattgtgagctgttatgtgggtgctgagaatggaacgcaggtccttcggaagagcagccagtgctcttagcagtagttcattaaatatgtttttaaaaatcctttccctcagctgggtgttggtggcgcacgcctttaatcccagcactcaggaggtagaggcaggtggatctctgtgagcttgaggtcagcctggtctacaaagctacagagaaaccctgtctcaaaaagccaaaaaaagaaagaaaaaaaagatcaaggattaggagagcacttgctcttgcagaggacctgagtttgacttccagcacccgaatggcaggtcacaaccatccgtaaccccagttccaggatccacatgatagacacacgtgtgaacaaaacactcatacacataaaatgagatcaacaaatcttaaaaacaacaaaacaaaacaaaacaaaaaagcccaaaaaacaaaaacaagagctgggcgttggtggctcactgttttaatcccagaactcaggagtgagttcgaatcttgtgagttcgagaccagcctggtctacaagagctagttccaggacagcctccaaaaccacagagaaaccctgtctcaaaaaacaaaaacaaacaaacaaacaaaaatcctttccctttcaggcatgtgatggtaaaactggcagtcaagtatacagactgcatggggtcttaccatcgggagagctggagacgaggggtgcgtgccctctgcatcgcagagctaaggctgactgtgacacacacattacacacccactgcttcctggtgctccttgggaacttgtgagaggcgggtgctactggaccagtttgcaaaagaaggagcattcacagttgcctgagtttactataaacaggctttgtgtgagatggttctgcccaactgcaggcagaacttcaggaagtgttctgagcttgtttgaggtgacctgggacagtggatgtttcataggctaggggtgttctgtgcacattttcttctatgatgctggctctttctacacagcccagagtggctcaaagctgtcatcttccggcctcagcctccagagtgctgggattacaggcgtgaatcgccatacccaaccaaaaacacacttaaaaaacaacaaccacaaaaacaaacaaacaaacaaacaaaacaatgtatttatttggtgcacgtgtaaacaccatagttcactgggggaggtcagagtcaacttttaggcatcagctctctcctagtggtgtagtgcgtgagtctggggctcaaacttacgtcttcatgctgggcagcacacagttgttctcgatgagattttgactcacagggttttccatttctgatggatttgtcaagctgcaaccccgctgtacaaggtgcacaggtgactgcaagatggctgcttcccaagggagaaacgggcaggcagccgactagcacagaatccggagaggccaactagctcctcacagacggccattgtcagaggaggcagctgttttacagtgggtgaccctcttccctgggcacatgggagctgtcatccaagaaagtcttaagtgtctgtcctctctagccaaatgtcctcagagaaccttatgaggctggacccagaaggaccatgccagggccctaagggcttcctataggttttggggcgcaacttctgtccttgttctgttctcacatttttagtttctgactctccttcatgctcccctcctccagcagcccccacacaagggacaagttagggtaaacagtggggttagtttcgagtttgtttttcagtgctgagtgttgaacacaaggcctcgtgtgtgactagcaacacaactctttaacaaagagtctggaaacactagtgattaatgtttaagtctgtttttttctttctctggctactaaaaagaaaaaggggcagaggctggtggtggtaatcgctcaccctcaatcccagcactcagggagtcagaggcaggcagatctctgagtatgagaccagcctgctctacgaagcaagttccagtatgtctaaggctgcacagagaaactctgtctcaaaaaagcaaaacaaacacccccctaaaaaatgaaagagagagagaaaaggaaaaagaaagaaaaagaaggggggtagacagatggctgttggtaaagttgataaaatgcttgctgtgtaagtagaggaccagagtcagatgtccagaagctgggtcgatatggtcgcacatgcctttaaccccagggaggcagaggcatgcagactaatctacataacagaacctgtctccaaaaaaaaaataattaagttaaattaaaaaaaattaaaatagacttctctgcggagacaccatgtgagattgcaaaggggtaagagtccagacccttctccgggagagacttaaaaaaattatatttcaacctctccatcaatgtcaactccatagaggtgccaactcgaaaagaaattatttgccacggatctgatgacaattattccttttgcaaagctctgaaaggagagactgtgaatacaatagtaccattttccttcaggggaatactatttcctaagggccaatacagatgtgttgcagaagccattgcaggggataatgaagaaaagttattttgtttgaattttaccgtcatttaccaccctaacgtcaattagaataaattaagaatatatttaaaaatattaaaaagcctgtgtttgtgcatgcctgtaacctcggtgctagggtagtgggtgtggagacaagtggatggatcacagggctgacatcagtctaactgaaacagtgagtttcaggcttggtgagagactctcagaaaataagttgggggccagagaaagggctcagcaggttagggagcttgcagctaaccctgagtgggatacgagtgtgagccctagaaccccgtagtggaaggagagaaacaccttgtgaaaattcttctctgacctccacacccatgtggcatgtgcactcacacaaataagtaaataatgttttaaaaaataaagtgtagcggcgactggtctcaacaccaacctctggcctccactggtgtccatgggtgaacacaccctcacacacatgtacacatgcccaaatcgggggtctggaatgcagccccctgggaaaacaaacaacaaaagcaacttcagagactgaggcaggcaggaaaaaacaatattatgattagttttgatgtcgacttccgcaaattagaatcacgggaggagggaggaaggagcagcacctgaaaaactgtcctgacggctgtgacagctggaggaagacccgctctaactgtgggcgccaccttttggtagctgcccaggtagaaagtgcatgatgggaaaaagaaggcacctttttctctttggcctttcctcttcctgaggagtctttttaccctgtgtcttaattggggtttccattgctgtgaaaagacgccttgaccacggcaactcttataaagggaaacatttaattgaggtgatgcttagcgtttcagaggttcagcccattgtcgtcaaggcggtgtgtaggcagatgtggtgctggctgcatcttgactcggagacaacaggaagtcaactgactgtcacactgagggaagcttgagcaaaagagacctcaaagcccgcccccacagcgacacatcctccaacaaggccatgactcctaatagtgccactccctttggggtcactatttcaaaccaccacaccctgttgcttttgaccccttcactgacatcagaaccagtgtttccaggcatttgtgatgaactaaggaccagtggctgtccagatggggaccactgaggctcccagactgagaaccagaaacttccagattctcgtgtgattgagcgcatgtgtgtaggattgtgttcctttagagaaccctgactaatacaatcacaatttaaggttgaccctgagaggggactcaggaaataggaagggaggggataggacacccagtgattgttgcctttcttctttgtatggcaagatctgcttccagcacaattgggagaaacacaaaacattgtgtcaatatgtggtaatttgtgtgattcaaaccattgcttcatttttccatcactgtcagaaacacctgacacatggtttaaagggaagaggttactttggctcacagcttccgcaatctctctcccccctctctgtctctgtctctgtctctgtctctgtctctctctctgtctctctctctctctctctctctctctctctctctctctcgttgtttgagacagggtttctcacaaggctgtcctggaactagctcttgtagctggtctcgaactcagagatcctcctgcctctgcctccccagtgctggaattaaaggcgtgtgccaccaacgcccagctcagcttccacaatttcaatccaccatctctggctctattgtttctgagtcacgcaaagcaatacttcatggcctaagagagctgctctcatcaggacagccaggaagcagagagagccggccagggcaccgcatgttcccaagggcttaccttcagtggactgcatctctcagtcaggctctgccttttaagtttccagcatgtcactacatagtagtaccattcaggggactgtacctttaacctatgagcttgagagggacagttcacactcaagccagatagtcatggaatagaggtaacatcccagaggaaggcgagcttgaaaggtcaaaaggaaatacagaaatatgggtggacctcttgtggggtgttttctcctactgtctcagaccaatcttgctgaatcccatgatttatataatattggtgctatgttgttgcatggaaaatttgtttctctagttcagcacagtgccatgtagcttgtcagagctgcaatcaacatggtctacacagtggttgaccgtccaccctgctagaggctggaaggagtcagagatgcaggcctcagcgagggaggcctgctcgctctgaaggcactgcagccagcccgttccacacctttctcctggctccagctccttcactgtgggggatgtagctccagtcctcacacacgtttccctcacatacccagctatctccgcagtttttccttcaggagtctatcattcctattagaataggagcccaatctctttggtatgagttcatcagagctaattatgtctccgtgacaatatttccaaatatcatcacattctgaggtactgaagtttggaacctcagcgtagagattaatgtaggggcacccacgatccgcccacaaccatgtgggttttcctccatgctaccagtggaagaaatcccccaggtctcctgtgtgccagcacctcctcccagctcctccatgctatgctgtccttcatatgcccatgacttacttcaaatgtttatttcttttgctggagtcatttctcagtcttaactaaacagacaatgagacatgctaggcacagatgtctccaaatatgtttgtgtagtgtctcagattcaaatgaaggcccagatcacacatacaaggctctttgtatgggttttctcataccttactttatgacttgcgttgtggaagattatcttaactgtataaaggtgtgctacatttgtttctgctgattttgtaacaaggcagagacctgttacatctgtttgagtaaatgaaatgaacctggggtcaggaggttgagtcaacaactagctgacaggaagtgataggagcaactaagtgtaaagggttctttagcgggggctgagtagagggatgcccctgttttgagaagatgcaagcaaggagaggttagctatttgctactctgcctctctgagctaggaggatttcacctcaacctttaaattctgagttctatggaaggatagagatttaatttcctttaatggccatgatagagacagtgcctgggggaacagaattcccacctggctacaggccctctggccaaaccactgctggtagctgctgaattgcaattgtcagttgggacagcagttgcttaaggtgcagccactgtattgaatgaaaaacaacagacttggggccccagatgtcgtgtgctagtcctggttgctgggcagtggtgttgttgggaggtggcaccgacattagaggatgggcatctgtaccaggtactttttcattgttgtgacggatgactcaacactacgcaacctgagaaagggtttattttgtctcatagtttgaggagacacagttcatcatggtggcacgtggccccatggtggcaggagagtgcacctgggatccttacctcagatttaggaggaacaagaaacagagagcatattggcagtgggcacgtgctatgaaacctcggtttctaatctcaataacccacttccagcaaggctcccacccctaaaggtttgacagccttctacaacagtgacatcagctggttgtcagtcattcaaacacatgagcctgtgggggacattgctcattcaaacccacaccaagtctaacaaaaggaagttaggccattgaggatattggtgttacaagcactctttcccgccagcctggtccctctgctgcgtcagccccaaatgaacacacagacactatattaattacgaaactgttggttgatggcttgggctttatattggctagctctgtcttaattattaacccataactactaatctatgtacttccacgtggtcttggcttaccggagaatgctgggcctgcaactcctttgcctgctacatcacaactgttctggagggctctctgcctaccttccccagactcaattcctttcctagtcacgcctatcttcctgtctcgttggccattggcccaacagtgttttattcaccaaccaataagagaaacatatacaaaaggacatccccatcatcttggcactttggcccttgcccactccctcattgtacctcagcacagctctcaacaaagaggtcatggacccctgggacagcaagttcactcagaagcctatattgacctcattggaaaagttgctgaattatctgcctatcttcacaggccacattgctcatcccatcactgggaagaaatcagcaactagaatcctggggactgccagcaaatgctctcccctccagtcagggagttgtgaggcctctcaaagcaggaaggtcaagcactaactccttatggtgtctggggtttccattcaggcaaatcaggacttgggctccagttggacaagatggcggatgctggttggacttggtctgcgtgtggccagcagtagtgcctataaggacagcgagcctggtctctgccattctctgacgtttatcagccaactgttcacctcgggtgtgagctgttttttctaagggaccgtcaggccaaatcgtgatccacatacgtgcttttcctggaattctcttctggatggactaaaggacacactgcagaacgagaggaggaggaggaggaggtctgagatgagaagacggattctccctgaggtgggtgtccttttcattaggaatgacattctctgggcacccatcggcttcccgattcttttccaggagtgcttgttgcccatggactgaagacatagtggctcgttgcctttgtccacagaggctgacattgctgtgctcagtgctgacagtacagtcccatgccacagctctgcccgtcaggatcagaacccaggttccctctctggtcctctgcttatcctggctcccaccctgcctacctcatacaggtttccattccaagccccgtacacagctgagaagccagaaatggaccctgtgcagggctcttccctgtagtgtccaggggggaggttggcctcccatggttgacacaactgactcacctctggaagctatgctgctgtccaccaattcatagccaggcctaggcgttcaggagaaagcagtttgtagtcacaagacctgagagccagaacgcagggggaggcgctctggtttccccccctttcagaaagagacatgaaggtccagcgtagacagactgtgtgtccagggttacacagcttagtaagaggcaaacctagactttctgagcctcagggtccgtagtctgtggcttctcgaacttcaccttgtcattcttttcaaaaaggaagaagataggggataaggagtaaggggggatagggaacaaagaaaggaggaaggaagcaagatgctatcatttaaagaaaaaggtgtttgagctggtgaaatagtttagtgggtgcttgcttgccaccaagcctgaggacctgagtttgatccctggaacctacacgttgtaaggagagaatggacaccagtatattgtcctctaatctccacgtgtacacctacacacagacacacacagacacatacacaaaacatacaaacatacacaccacacagacacacccacacagacacacccacacccacaccgacacagacacagacacacacagacacacacacacacacacaaaacatacaaacatacacacccacacagacacacccacacagacacacctacagacacacccacacccacaccgacacagacacacccacacacacacagacacacacacacacagacacacagacacacacacacacacacacacacacacacacacacacacacacaaaggtatttcagggctggggaggtagttcatttggtagagcacttgcctaacataaacttgggtaccaccccagcatacatgaacgggacatgtaaagtacttgtaattccagcgcttgaaaggtggagacaggaccaggagttcaacatcaccctttaagtagaagtttgaggccagcctgggtgttgtgggaactcgtctcaagaagcaaaaagcaaaacaaaaagaaggaggaggaaaagaaaagtgtggtgttttggtgggtactgagggagggccactccttggcttcaaacatccctttgcaaaccagtagctatggcaaagggggcctgactggcctcttgtatcttacaacagcttggattgagggaccttgttatccatggctagtaaaagaagatgtaaggctgtatccacttgttaatctggagagaaacttataatggtggatttcggtattaatgtggaccatttcctgagtcgcccagagccctgtgtagggcaaacgcggctggaccaaggccaagaccagctctacctccgagtcacttctctgggggctttcgctgctgcgcctccgccctggggaaactggaccttcagtcccaggatagtcgctccagctccgcggggctcccaggacaccgcagcatcgggtttcgcgtggcagcccagcttccctcactcggatcccctcccgcctgggaacgctgcagccaatcacagagctgcacagctccgggttgtagagtcccgagcccgggacccgcccctctttgttgcggtgtccaatggacgcatccagaacatcggcggctgtccgggtgactcggttatatgtcacagaataacattcgagaatgggacatggaatgaggcgacggccgacgcagctccaacagccctctgcagcaatgaggccagctggcccgaggtgggtcctcgtgccccgcgcgcgcgcgcgccctgactgcccgcagctgccacgcacgctgtccgcgcgggacccgcgggaagggggcggcgctgcgcttgcccgggaaccccggctggagccgcccctcgcgcgccagggttcggggggcttccgggaagacgccaggcctccttagcgagcagaggttgctgcggcgccctcgcgccagccccgggtgctcgcttgccagcttgctcacacctggggagccagggatgagtgaagcctggaggggacccccgcgtcctcttgccacacagctgtcttgcttcttcctaccctgtcccctctgcaccccgtgttccttgcatgcctccccatctccgggtgcagctgggtgtgagtcttcgtggcgcctttccagccgccttgctaggtaatcggccaggctagagactggcgttggtcctaagggggtgggtccggggcagcgaggcagggggtgggcgggagcccccttgcctgtctgctgagccgcagtgtgtgtctgctgtttccactgctctcaggcccggccggtgagcggggagttcccttagcacgtcctgcagccgcgagagatgaaggccacccccgcggggctctgatccctggcgcgcccaagtcccccgccgcgtgcccctcaccatgaccggctccgccgcggacacccatcgctgcccccaccccaaaggcgccaaaggcacccggtcccggagtagccacgcgcgcccagtaagcctcgccaccagcgggggctcggaggaggaggacaaagacggcggggtgctgttccacgtgaacaagggtggcttcccgatcgacagccacacctgggagcggatgtggctgcatgttgccaaggtccaccccaaagggggagagatggtgggcgccatcagaaacgctgccttcctggctaaggtcagtggcgtggctgggagaaggcgggatggtccggatgggcgggatggggaccggctcagccagcgcagagcagggagacggacctcatgtccagcctctgagtcctgaccccagttccgctgccagaaggggcaggcagggggattctggcttggccctgtaaggttaggctgagccaaaatccagtatgtactcagcccctgtaacgtcttctccatcaaaagctagtgtcaccagtttaacaccagccactctaagaaagcgtagaaccccacgtccaccccgcctgccctcctggagtgtatcgctcctcccctgcttccctagaaatgatttacagagctgtgagtgaacttgtaatcagccaggcagattcctcagctgaatcatctctagactttttgccaatttccttccttccttcctctttctttctttctttctttctttctttctttctctctctctctctctctctctctctctctctctctctctctctttctttctttctttctttttctttctttcaacgacggtgatttttacctctggaacgtacagaaaacagtgaactgtctcttcccagcttatccggcgccaaaggggagaaaagggaagcatttggctgtggcttaaaagggactttccagtacatgggatgaattagtctccccgggtaaaggaagaggcctagtgaagctctctttttactctggagggcagccagccagcgactgaggttggtggccaaggatatggttacagagggaagatgtccctcggtgggagtgtcctgttacataaaatagcaaaatgcaagctaggtgaaagcctggtgtaccactatggagatgctccctggaccgtagggaccgtgttttcgagaagggtcctgagaagatgcagggatcatatacctgagaccccagagtcagtccttagcctgggtgcaagactgcagaccagaaggctgtgtacgcccttggggaagtggaggaggctctctacttcccactccatagtgttttattactctgctagcagggaattcattctgtccaaatagcagcttgtctgcccgagcatcagcagtaatgatccctgctcttgaacacagacagcccaggctctgagttcatctttctctgcttaccatgatccaccagtccccaaacagggaagagttggccagagggagcagaggctggttgccacggtcagggctggctttctggttcctgcacctcctttattgtgccttcatccagttctctgtgtgggagcctttctctgtgtggacaagcttcaggtcttagtgttgctgaagacgtttctcactcaagacctcctgagagggcgttagtacaagacagtgccaccctgcctctgctcgctaaggcctcctcctccttccctttctcctcctccctcatcttcctcttctgtctttttccccacatccgtctgctctttctggacttcagctcatttgccgccaggcagtcaactgcctgaacacagatgagatgcagcctcccaagtgttgctgaggcgatgctcccagtattaatgctgcctttacataaaaggatgtcccagtcaggcatggtgaagaattcctatagtctcagcactcaggagggagaggcaaaagaattacaagttccaggcagtcttgggtcccacagtgagttcaaggcctgcctggaatgtgtagtgagatcctgtttcaaaagagaggagaatgttcctgtatcttttatgtatcatattgtattttcattgtaacccaagagccccatgacagttgctggtaagtcaggactcccctaggccattgcctgctttagatttgtttttgctatttgtttgcttttttgttatttattttttaacctttaaagatttattttctggtaatgggtgttttgctggcatgtgtgcacacaaaggtcagaagaaggtgttggatcctctagaactggagttacaggcagttgtgagtcaccatgtggatgctgggaattgaacctggttttctgcaagagcagccactgttcttcaccacagagccagatctccagtcccctccctgttctttgcttcaccacagagccagatctccagtcccctccctgttctttgacagggtcttggttgtatttgaggctagcctcaaacttaagaccctcttgcctcaggggtctgatttctgggcctgtaggtatgtcccaccatcccctggtgatgcttgggtctctaaacttgaataagagcctatgatttcattttcctacattgcatatttggtttttgagaggttcttttgtagcctaggttagtctcaaattcattctgttgaggctgggccttgtctcctagacctctagttatcttccaagtgagcagtgactcttaatagttggggtctccaccctcaacaccatcatggcgtctcctggtttcaatagcccccaaaccctggcccctgcccaggcacaggcatggaagtctctgccaggggctgttcctctcccaactccagggcttggcagtctctccccgggccaagcttttcttctttagccaacaccatgcggtaaggaatttgtaccaaaagtgggtggtgggacagtgctgagggattgctgaatttgggtgagattaactactttatccatagagtgtgaaccgaggcaagatagtatctggagcaagttcccagggtctatgaggcactgatgacaagtccttcaactacaggatgatctttctgttagggacagtaataagttctgcttgaaggcctcggtatctctcctgggagcagggattggggaagggtggggcatcacttgagaccctgtctccaaattgtaactgcattcctctccacttgtggttgctgagtccaaatgagcacttgactaggcttctgctggggttatttaagaaaagatcccatcatcggggtgacacagagtgacagcatgtggcaggtgcagaggagcaactggcccttctaggtctggctcttgtgtgtcctgctgcccagagcctgactctgctgaggccagacaccagggcggctcagccagaaaggctgcttggttttttgcagcccctgtgagtgtgtgtctcattttcacagtcattccaaatttggaaagaattcacattagcgggctgagatctgaaatgtgagcagggatttgagactcctgcaggttgcacccctgcaccctgtgctcctgggatgcttcctctgttctgtggcctggattcggaactatctggatcttcacaaggcgtgactccaggacatgtgtcccagaccacaggctaggccctttgatgcaggagcctgggggccatcctgggagtatgactgttccatgctacaccccttccccccgccagtctccaggaggtccctgctgcctttgcagtaaaataaatgctttggtttctcctcgttcttgtccaaggttgctcaggtcggggcttcttgctgtctgcctggctccatgcctggcttcccctttgcttcttcctggccatgccagttacacatctgtgctcacctgcagccctccctccctcttgccttctgtcagccttcttgcttggcgagaaggaagtggagaggccagccctgagtcttgcctgtggttctcattattcttccatgactactccacaccctttttttccaagtccttggaactgcccagggcttcctcaccagcactgggtctgcctttcagggcatggcgactgacaggaaggacagaggaggatgacatttcacgggggctttaatttctgtttgttagtgagcttcaccttttccggagagtcgtaatttgcatttctcctttagtaaaccaccttttgagaccttacttgtttatcatggtgagattcgggacacgggacttaccttttaaccattttgaagtggatggcttctgctgtttgggctctcaatgccccaaaggcccacctgttgaaggcttagcccccagcctagatgctgtttggtgctgtctagtaggaaggatttaggtcattagggagcgtgccctagaatcgggacagtgacctcccctccctgtctcattccttggattccatgaagtgaacagaccttctgtaccacatgctgtctccacgctgtgctgcaggtccaaagctatagataggtacaagtgaccatgagctgaaaactctgaaaccgagagacagaaatcaacctttattctttataagccaattgcctcaggtcctctgtcacagccatagaaggttctgtgacataaaggacatgcccatggttatacccccatcaccaccacgcatctcaaaccttccactttcctctgaaacacacgccctaaaaaccgactgcccagtagtgcttactccctggcagtcactctgcattttgtcagggaagctgaccactctaggaacttcatgcatgaagaattacatagtttgcctttagaactgtttttatgtttgtgtatgtgcacatgcacaccaagacacacattcggaggtcagagaggtgtgggtctcttcccaccttgtgggttcgaggaaattgaattcaggcttggtggccaaggcctcctgctaagctgcctccctggcccagtattggctgttttgaggttggcttacttcaggattcatccacatttcagagtgtccccaggaggtgcctgctttcgaaagctgactagcatctctccgtgtccggatggagttttgtttattctgtccatccacaggcactgggctggccccgtttttttcccagagcctagtgagctttctcaccactatgacgtctccacgaatgaaggacaccacctcctcacttgacaatggagtaacgttcttgtctcctgtggggcaggcagacatccgcaggatctcgtgtctaggaactacgtacggtccctgctgattctgagcctctctggtccagctctggagagcacattaccgatggaaaatgtcacagctacacctgtgtgcactgtgtgctgctccaccctgctgggtcttcatagagctgccagggcagatgaggcagtgttgttgttttatctgcatgcaagtggaggctttgggggtcctgttgtgtggccacagtggagatttgaaccatcgtgtacatttcattattacacctcaggggcccttctggcttatactccagatccagcagaaacactagctgcctaaggtgctgtttgaagttgtcccaggctgagccacagccagctcacctgacttctggtgatgataccttccactgagtgccttggctctccccaccgcagccctgctccagcccacatgggggaatacttacatttgtcctcctatttgggagcaaatgtggccacagccagctgaggtaactgtgcagctgtttgctaaatcccttgggcgccgttggctgctattctgaggcccagctgccttctgagccctgcttcacacactgctctatgggcgccaggggctggaggaggggtagaaataactctggtcagctcccaaagaggactgtgagcaaagtcacaggcttcgagtgctgggactcgctgtctctcacatgcctctcttcccgactttctgtgatgggatctctggcttccttccttctgggctcccatgtttcctgctctgtacctggcctagtgcttacaacacagagatgctaaggaagggtctgttctcagcctcccttctctactggcctctctgaaacctctgatctgttgttatgtacatttggtagacgtgtgggtgtcactgtgaaaaaaacaaggaatctcaacacttgctagtgttggttggacagagaattcatgtgtgagaaactgtttctgtgggagtgtgtgtgtgtggggggagtggcatatcaagtcatgggaacaaatgttcaagttggaaccttttgccctccaaagtgactctcccagacagggagcttgagttgaggtgttggagagaaaatgtggcttgtagttgggcttgtgtgtgtgtgtgtgtgtgcccacagagcagtgctcttgctcacacaacagttgggcctgtgtgtgtgtgtgtgcccacacagccgtgatcttgctaacaaacacagcaccttggcttgcatgtaccaaatgggactgcttcccttccagctgaggggatagtttctgtgaattcagaatgtctcaaagccaaggctgagtagaggcactgagtggaaactgccatcgggcaatgtttgcagtaaatgttgcacacatggggaaagagccggctaccacatactcagagcaccgtgcccatctctcactgcacacggtggagcgtgtgcctggagagccaggaactcccggctctgctgcccggcttggctgtcctcattctatttgcttcctgttttactagcagcttcctcttctgtttgcagagctggtcctgttttctctaagggtgaaactaatctttcctctggctctttttacttcttttgaagaagctaacacccaggggagcctcctcccttaatcctgcacacatagggaccaagtttcttagtcaccagtgacatagcccaccacagacatggagaagatggagtcggtggggataaacagaccttaatgtgttcctgtctggctgatgtccttgtgtctcgggagtggtttggttgagtgctgactgtaggcacttgggaaaggggagttggctgggctgccatgaggatgcctcatgagaccgatcttcactcagggaaagggctcagggagggaagccgtgggcatgtgaggtgtgtggtgttgagaaatggtgcccatggctgctcaccattctgctgcagttacttatcttggatgccatttgcctcgtgtcctgtgtcaatgatgttcaagaagggagcagatataatggagccactgttagccattctgcagaatgggccatgcggcaaagatgtagggatcagtgaagcacctggggtcccatcctgggccagctgcagtgggatattccacaggatgtgctccctggcctcaagaaggcaactatgttcccatagagaaggcaaacggtgttagaccagtgtcaggagggccttagagaaccatggcccagagtggagtgtgtttggagggggcttagagggcccttccatggtggaccagctgtcttcgcgggagatactgtggggaaggtaccatggctactggtgactatgcctagtgtgtgtctgctcccaggagcagctctcacttgacttcagctccatgcctgctccaggagctgtgctcaagcaaccactcaataacaggagcccccctctctctatctctccgtagccttcaattccccaggtccccaactacaggctgtccatgaccatcccagactggctccaggccatccagaattacatgaagacgctacagtatccttttcgccaggggctgagcaccacagacaaaggatgggcgcggtgatgacaagcttggtggcatgtctgtcaccagctggttgtccaaagccctgtaagactggaaatgttggaggacatccgtgggtgaaagcttgcagcacacatgctgacagtgaccagaatgaccagggcttgtccctcaaacagagctgtgcccctggtcctctgtgagcctgtcacgtgctttttccccttccctgccgtttcctctgctttctgtgggattatctcttctttccattccttcccattttcttcctcctcttgattgtctttattcccttcttcccccccccccccgccagtggttttttttgagacagggtttctctttgtagctttggagcctgtcctggaactagcccttgtagaccaggctggtctcaaactcacagagatcctctgcctctgcctcccgagtgctgggattaaaggtgtgcgacaccaacgcccaacatagtgatttcatttctatctctgacaaaatttacttccttcttctttcctttcaacctttcttccctttgctgagataagggtttgctcttcagctcagaactcactatgtagcctaggttagtcttgaatttgctatctgtattttactccatctccttaatgccaggattacagtttgtacctccatacctagctcctaactctctctctctctctctctctctctctctctctctctctctttctctctctctcgttgtgggatgcccttctgtacgttgcaaatatgtgtagcttttattggttgatgaatgaagctgttccagctaatggctaagaagagtaataaagccaggcaggaaatccaaacaaagagacagagagggaaggtggggttggggatgccatgtagccacgagggaggcaagataccagggcattactgttaagccaagtggttatcttataagcagctggggacctggtgggcagagagaaactggtgcatggggaccaggcagaatgcataaagcctccaactacacacacacacacacacacacacacacacacacacacacacacacacacacacgcagagtctaggcatggtgatgcatgtctttgatcccataccttgaattctctgtgaattcaaagctagcctggtctacaagagagcgttccaggacagcctttgttcccttcttttcctacatgattggctttctttttcctccctcctccttagaaatgattggataaaagggtagatcattgaatctacttttaaactaaaaaaaaatctactagtgttaaatattttacattggtatagatttttgtatattgataagatttaaggttatttttgttaggctgtatatgtttctattgtttaagttattgtacctgtacaacttgaagttttagttcttgaaagctttttaggataatagagacaggttagtagttagtcatctataacaatcaaacagagtcatgttaggtatgttttcaaggtcatacagagatattttaaatagacaggtggtcttcaaacacctcagaaatctgcagagtatggcatttaaaatgctttaataacccaaagcttttcatgacagtgagacacgtctgctcctggcagcaccaatctacttcacaaaaaggataatgggcattgaagaccctccatatggagtttgctttcattgtggcaaagttagccactgggcaagaaactacctttgctttgactgctgacagtatgttgtccaaattgggcaaggaggacacaaaagaaagtgactgctgaactttaccaagacaaggtagggtagtccttaaaaaaattcctgcttcacaaaaagtctgtcagatattctagtcctgtaggctgaagatgatgccccaacattgcagaggaaccgtggttgacttgtccagacagccagctgtttctgtcattcctatagttttggaagttcttgttctgtacttcctgtttactcaggtaatattacatccttcttgggtctttgatagagttgaagactagatagttatactaatttctttattaccaaattaaaaaagaaaacttacaaaagagatgtaaagtttataaggttgaaaacataaaagctgcagggcattggtggcacccgcctttaatcccagcacttgggaggtagaggcaggtggatctctgtgagttcaaggccagcctggtctccagagcgagtgccaggataggctccaaagctacacagagaaaccctgtctcgaaaaacaacaaaaaaaaaaaaggaaaaaaaaaagaaaaagaaagaaagaaaaacataaaagcttaaattgttcatctgagatgttttaagttctaaaaagacatttttaggatggtaatacaagttatgatagaaagtggtttaggtataaaactttggagtcatcatgataaggctgataatagagtattttcccccaaattgcccaacacaaatggactggacactgtaaatgtcattcttacctgatagttgatcttagttctcctgtgttagagttaaaccctttcctttttattgagacaaaagggggaaatgttgcagaatatttgtgtacactgtaaagctgagtctctccctaaggtgccctctggttggtttaattaagagtcaaatggccaatagctaggcatgagagaacaggcgggacttccaggcagatagagagaaactgggaggaggaatctaggcaggcgatttcacccagtgactgaagacgtcagagacacagtacagagcagaggtaactgagccatgtagcagaatgtagattagtagagataggttaatttaagttataggagttagttgggaaaagcccaagctaagggcaagctttcatagtaacaagtctctgagctggcattccaaagatagttccacaagaaagcttgctacacctcctagacttccttttctttcttctctcacttgttttacctcatccctgacccctcatgatctcaagagacccaactgtgtctgcctctggttcccagcaacccaggcaaatgactccgtccagttgtatgcacagggtgttttggctctgctgtgggaccctgcctcagcttgaactgaaagagccactgaggagcctgagggtttggcctcctccgtgctctcaggttgtttatagttagggttagttgagttctgcaggtcccttaggagcatcaatgttggggcagaggggcagaagtgatggccatggattgcttctggtattttgtttttgtttttgtttttgtttttcgagacagggtttctctgtggctttggaggctgttctagaactagctcttgtagaccaggctggtctcgaactcacagagatcctcctgcctctgcctcctgagtgctggaattaaaggtgtgtgccaccaccacccggcctgcttctggtattttataggcacaggagtgagataggggccagcttcaatgtgatttcaggaggttgcccctccggttgaggtgcagaggagcccctggcatgttggcttgggttctgcttgctcctccccaactttgaggacttactgcttccaaaggtcagacactgcatagcccccctgttcattaagatcgattacttgatgagcagctcagtttctgcctcataggtcatcaccttcctacgtggcaccttccccatggagtcctgactcctcctcaggagacagtggcttccccagagagaggctggcagccctaggccctactaggttactgggtaatgctgctgatctccaacctgagacaccatatgcattgttggtggtggttgaggggcacaaaaccttcctaaatggacccaggccccatgagctgactttaattgtcacttactcatcaccaaacatcccaggtgacccaaagttagagcaactctcacttctatctaggacgagccttcccaaggagaatgagcctggatgagcttcatcacgagggacaaatttgcatgtattttgcatatcattttccgacactgatagaaaagctgccacatataaccagcttagtcctcatcattgctcttaaagggtcctctttctgcttcttctctgacccatttacggtggccatcaccctagattactgactgcagagtaggcagtggaagaaagcaccagggaaaatagggggaccacgtcatcaggcctttggggccatgatcaagagaggcagagtggaaaccattctatttctgacctggtgtctagatccttgggtgcctgactgctttgccttgacacaggtggcaggatttgggcattgcctggggccatacatgtaggtggatttttctgtcctggccaccagctcccaaataacctgaggacttattaattatgaaaggtcggccaatagcttaggcttgtttctaactagctcttgcaacttagaccaacccttttctattaatttgctttctgcctcatgactttactacctttgctctgaacggcccatgctgcgtcctctgagtcctggggtctccttgtgactatacccttcttcccagtgttctctttgccctgaaaatcctgcctagctattggctgtttagttttttattaagccaatcacggtgaagtatctttacacagtgtaaaggaatattccacaagccatacctaactgtacatgtgctcagacgtcagtgctgttttgatgggccagaccctccttgcctttcctggaacagtgtgagccgcagtgaaccaaaatgccagtctttgtgtgtgtttggaaaaaagagcccatggctttgctaggtgtgggaagcctgtccaggagctctctgctttgcagagagacacttccagaagctcagctgccaaccacaagaaacttagagaagatggccagacaactttgcattacttaattatggattaatcttactttttagaaactagattctactttaaatgtgctgggaccccactgtttgagcaaagtctttgatagagtaaagaagccccatttcacaataagagccccgtggttttttttaccccctaagatttttcaatatcttattttagaaatgcccaggtcagtctctcctaaggtgtgctggttcacatcacccctgaccctgactgtgttgttcccaatccagcattcagaagtgaggcaggaagtcatgagcgatggccacagctggaatctgctcaagctacaggctctcaatctgtgccctttgtctggaggagacctagttcctctcagggcagtgtgaatgtgaacccaccctccaagctgcttgcatcactggggagacatagtgagtgagtcctgtgcacccaactgggtacagctgcagctttaggaaatgagtcatcttcgtcagcatcctcccagcacacactgtttcataaacaggattttgctcgaagcacaagagtaaaacatacaaatcaagttttctttaagctcaaaacaaaattcaaaattatgtctcagaaagaatggcgtggggagtgtttggtggtccagggttgctagctctggagaactgggcagttaatcagaatcagggtgtggatagtggagccatctgtttagattagtgaggtcaagtgttgatccaggcatgaaaaaagtgacatttccttgttaagttctttgtgctattgaaaagtcttactgtcattcatccgctctcccatcttttcttctatacattaatatactggtcagccggtaatatatacatcctcttgttttattcatccatccatcatccatccatcatccatcatccatccatcatccatcatccatcctatctcccacccacccacccacccaccatccaaccacccatctacctactcatccatttacctttcttccatctatcagtctgttcacccattttccttttcttctgtctgtcttcccgtccgtttgtccttctgcgcatctacttttctctctatctaccctttcacatctttatccacggagctgtctaatcatcagttcctttacttattctcatttgtttgataacgtttgctaacctgtgtatgttgagcttctcctaggctttatgggtggtccagagatgataagagagtggtcccagttctcaagagcttctagtctcgtacgtgacttaaatatgtgatcaggtaactgggcccaaggtagactgaaaggcagtgctatcaaaagtgcatccaggcccaattagaaattagatatctgggctggagagatggctcagtggtcaagagcactggctgttcttccagaggtcctgagttcaattcccaacagccacatggtggcccacagccatctgtagtggagtcttatatcctcttctggtgtaaagtcatatatgcagatagagtattcatatacataaaatgaatatttaagaaaaataaattagatttccaggattgcacagtgaggaatcacaggctgttggctacccctggccactggccagaagaacaactacttccttatcccactgagaaatgggaatctgaccaggactttggcgtctgtcactttgcctttacatatttcacacagatacaatcatacagggacccagttctttgaaatcaggaaaatgagacctctgagtgggtaagtgctgcatggcctgtggaccacatagcttctctcctacaggtgagccaccagcaccctctcctggcctctgtccctgtctcttggggctccagggttctagcctgcagagggtggaggcagaggtgccccagggccagactgtgggtggggctgaggactagttgcacttggcagctaaattcagtgatcaagactggctctcaggccaggtgtggtgacccacgtctttcatcctagcgtttgggaggcaagtggatctctgagtttgaggctggcctggtctacatagccaggtctgggccagctagggctacatagtgagaccctgactcagaaagcaaaacagaccagactgatattcaggatggcagaggcctgcaaacctgcctatgagggctgctttacttgtccctgtagtccccacctctaggatgggaggtgctaacacgccccctctgaggtaactgtagggggaacggtgtggacttaaggatcttagttctgtcaagtacacatgtgctttggggtcttctctatcgagttgttccccttctctctagatttctgcatgatgtctagtgtggagacagacatacggacagacagatgaactgagggacagtcaaactgactgcataattgcccaagtcctgagatcttgtgttgtgctctgtcccacaggttaatggaaacggcgaaagagatgacccgagaatccttgcctatcaaatgccttgaggcagtcattttgggcatgtatcctttaagctatgtgtggttactttttgaccctgttctggagctggttgtttctttggtgtcctgggagaaaagtctcagagccccttggtacttctctcagtttgacctggctggagttgaacaaaatcaatgcttggctccttggatcacattcttctaacctgttatctgtggagcagtcagggccagctgtctatagattgagcagtcacaaggagaaatggggttcaggacttcagagagtgcatgtgtgactctttcatgcactaacctgactgttgtaagaaagacttaagtggagtcttaaggcaaggccaagagggtgaatatccagacccgtcaccatgggaaacgggagagcgggttgaagaggagagtgagtgctggcagtgtgccatggtggaacctggtggatgcaggggctggcctcttgtgctctgtcatctccatcacattcttggctctttgccttgggaggaatttggttcagaaaagctgtgatgaccatgactgatggtggtggccacagaacacaaccagatagaagagccacagaaattctggggcctgtggggttgttggctggggggaccattgttgagtgatcgatccgcagtcagcaaggccaaggttctctttattcagatataccagccaagcgcaagccaaaggcagccaggccagagagaagagaagggagcagggagaagagggtctccacgtgtgcacggtcccttaagaaccattcctgccaccttagacttcccctcaccacgcctgtaagggcgtgtcccggcacacctgtctgggctaccaggaggcggggctacagtgtctccctacagaccatggccaagggagcagaacaaggggtcaggttactagtcggccccagatgaaagttgttggcttcttgaatatggtactaagtggctttcaagatgatctgaagctgaagagtcacatggtctcatgcctgggtatttcatttcgtgaggctttggaaagacagacggaacagtggaagcagctgggctggatctgcagagctcatagtgaacgcttaacaggaagcaatggtgatgcttgggccacgtccttggcagtgggactgggttgggcgaggcagtttccagagctgccaggagatggagtgtgcagaacttggaaaccaacacttgacagtcaaccgacacaggcttcccattaggccacagagggagaagatgagtgtgaagacctgcactgggagagaggcatggggtggagggaaggggctgcaggtgtttgggccacagcactgcgatcccgacaatgccacggcccaagggaaggacttaaaaggaaagctccagctgagttcagatgtgggctggctggatttgaaacgcagaacctggactgttcaggatgggatgtttggagggttgtgcttttggggggtgggtcagtgctacaaacacgagttgggtgatgtggatgttagggagacaggagaaggaaaatcgaggatgaagctcaaaattccttttatctagatggacatcaagtaccagcagtggagcctgtcctcgttcatgctctgttgctgtgatcaatgccatggccgaagcaacttagggaaaggggggtttatttctgctaatgcttccagatgagaggccgtcactgagggaagtcagggccggaaccatggaggaatgctactcagtggctcttgtcctggttgattgtcagctgctttcttatgcagcccagtcctgcctgccgaggggtggcacagctcatagtggactgggcccctccacacaaatcatcaatcaagtcctcacagccatggccacaggccagtctaatggaggcagctccctcaggagtcgaagctccctcattccaggtgactctaaactgtgtcaggctgacaataaaaactaagcaagacagagacctaaggatgcccagagtaggttgaaaacctggaaaggggataggaggtcagtggacggtgtgcttcagaattaggtggacagggggaaggtctagtctgtctgcttgcactcccctcccccccagacagggtttctctgtgtagcccaggctggcttagaactcacagagatctgcctgcctccatctcccgagtgctgggattgaaggcgtgcgccaccaacgcccggcctgcacagcaagtacttaacagctgaaccatctcttcaacccctcttgtacctttttgttttgtttttgctctttgaggtgctgaagactgaactcagaacctaatacaggctagcccagcactttatccaagctagacctctggccccgggttttgatagggtcctatactttgttctgtgtatgctgtgtgtgtgtgtgtgtgtgtgtgtgtgtgcgcgcgcgcgagcgcatgtgtgtgtatgtgtgagtgtgtatgtgtatgttttgtgtgtgctttgtgtgtgtgtgtatgctttatgtgtgtgtgtgtgtgttttgtgtgtgtgtgagtgtatgtgtgtgtgttttgtgtgtgtgtgtgtgtgtatgctgtgtgtgtactttgtgtgtgctttgtgtgtgtgtgagtgtatgtgtgtgtgttttgtgtgtgtgtatgctgtgtgtgtactttgtgtgtgtgctttgtgtgtgtgtgtatgctttatgtgtgtgtgtatgctttgtgtgtgagtgtgtgtatgctgtgtgtgtgtgtgtgtgtatgctgtgtgtgtgtgtgtgtgtgtatgctgtgtatgtgtgtgtgtgtgtgtgtgtggtgtgtgtatgtgtgtgtgtgtgtatgtgtgtgtgtgtgtgtgtgtgtgtgtgtgtgtgtgtgtgtgtgtgtgtgtgtgtgtgtatgctgggtgtgtgtgtctattgctggttatgaaatccagggctccctgcctgccactgcacgtttccacagtacagtgagcttctgtgcctcgatgctacttgcagagcaaacaagggtctgatctgaagtccgactgtccgattgtctgtctatgccttagttagcatttgggaagtgaggacttgagtctttctaatgcctctcccagagcttctcctgctcccatataagggaaatgcatgttagagagtccagcaggagggcaggtatctcagaccgccactcttagccagcaggatttagccacagttgtaagcagagccttttgctgggaaccattggctggggagctgctggtggaggccagcagaggacaccggccagaccctggcaagctgctcagctgctctgcctacctgctgagtgtgctgggtatgtaggcaatgtcctttgcacattgtcatgcatctcagcatcattgtatcattgtccctggcattacccagaagcacgggggactgtagaggtctaggaccctgctgggccagtactcctgattttactttgttcttacctttgtgacattgcagagaagagcaagtcaggtggcgagcgagggagactggctgtcatgctgtactcagggaaactggactcttgcacagacctccatccagagttacagaagttctgtctttgctctgtgtcagtgtgggaagagtgaatcgggtcatggtcagtgtctcccagagtttcccactgtcctgggaaacaagggttccgtgacaactgagaagttggtaggtttggctaacttgtggtcacttgtccttttctacctaatgcgtgtatggctgaatgtgcacatgaaggcaggagaccatttggttatggttgctcaggcaccttatttatttgtttgttggtttagataaataagtaaactaagctggctggtcagtgagcccccatggatctacctgtttctactttcccagcctgggattacaaacctgggtgaagatggagatttctgtttttcccttcagccccaaataagcacacggatgctacattaattataaaactgttggccaatgactagggcttcttactggctagctctctcttagttattcacccatttctattaacttgagtatttctatgtggtcttatcttactggagaagggtccagacctgttactccttcctctgttacatgtctcttttcactgctcctctctccttcctctctacccagaattctccttggctggtagccccttctatacttcctgcctggctattatccaatcagtattttattcatcaaccagtaagagaaacgtatacacagaaggacctcccccatcacctgggttctgggtattgaacaagggccagtgctttccaggctaagctgtctcctgcctgtgattgttttcacttctgcctgatgtttggggtcccttcctggactcccccactttgtaccctgctaactaatacaagtactcactttcccacgcatgccagacacatggatctcagggtccaaattctttcctgatacatggcagattctttggaggaatggctactgtgacgagcctttctgggaggattgtgctgctaggttggtcacggcccccggtgcacagggagagagacacttggcatttgggagcgatgctaaaagcaactactgccacaagcaggctacgttggttgatttgcttagtaacatgtttcaaagggtacctgttttgaggctggccttggacttcctctagcctcccagctgctagaattacagacctgtgccattgtcctcggtatcattttgtctgtctttttggtagtattgattgaacctgggcttcatgcttgcaaggcaagggttttcactctcacagcggccccggtcatctgaaggtcctctgtcctagttactattgtgtcctattgctgtggagacactatgacgaggcaactgatggaagaaagggtatttggggcttacagagggtgagtgggaacatggccccaggaagtcatggcactggagcagtagttgagagctcatattttgagataaaagcctagagacaggaagacgctaactgggaatggtgtggacttttgaattcttaaagcccctcccccccgtgacacactcacctcccatcaaggctacccctcttctgacaaggccacacctcctaatccttcccaaacaaacagcttcaccaactggggaccaaccactcagatacgtgagcccagcatctaaatgctcagctcctgatgtggagcatatgttttaagaattggagtttccactgagttttcaggatagggcttcactaagtagcctcaaactcagagctctgtctgcccctgcctctcaaaaactgggattaaaggtgtgtgccaccacacctggctcccgtataaatttactgtggcttcaggatgtctccttcagaaatgtcaggtgacaagtcacattaggactttgttcagagatctaggcagtcctaagatctgaggtggaagactgaggttttcccagtttgggctgagataatggttcaggcatgcgtggttcaggctacgcaggaaatcaagtggtcaggaaataggcgaagattaagacagattcttttaagaagtatttatttggaggacaacttgtaggagtcatttcttttcatcatcctgcattctggggatgaaactcaggtcatctagctcgggggaaggtgcctttacttattaagtcatctcaactgtgtgtgcagaagcaagatggagagctgagcctacactatctgcactcactgtcacagagtaccatgtcaacatttcccttagaagcagtcaggtaccctgcacattctatcaggaatgaccaaagtttctagaaaacttgggttgagggccctgagagctaaccaggaatagtgtggaatttctagaggggcttggaagtgtggtgccttcgttcagccatccagggcctggcgtaggatgttaattcaaggtgctccttttcaattattggtcaagaccaacgttgtagtggctggggaggcagctctgttggtaaagtggtcaccttgcaagcacaagacctgagtttgctcacctgggaccaatgttaaaaacaaacacacatcaggtgttgaggcgtgcgcttgtgatctggagaggtggaggcagcaggatcaatccctgggtctcattggccaaatagcttacctaaatgattgagttccaggacaagagatcctgtctcaaaaagtaagcacagcacaggaacaccaagggggacctctgacttctacacttatgtgcatacatcataccacacacaccacacacacacacacacacacacacacacacacacacaaaacaacaacaacaacaaaaaaacactaaagtcatggtaagaggctgccactaaatcgggtcaggccagtgagtcggtagagccaaggtgtgctgtgtgagttggggactaggatggagctggggactgaggataaatgttttctacatggtatcccaggctgttggcacaggtgtgccagatgcaacaagagaggctaactattgaaaatgggactcctgactcctctctgtccctgaccctctggtcaccagccttggccttacattgtctctgggatctctgttttccttcttgcctggacaaccacaggggccctcagatcctgcctgctctacacagagcagtcagaacacattctgattgtggttttttgagacagggtttctctttgtagccctggctgtcctggaactcactttgtagaccaggctggccttgaactcagatctgccagcctctgccttccaagcactggaattaaaggtgtgagccaccactacaggatctgattgtgtttaaaacacacttggctggggagaccacttgggaaactgctgcataagtacggagacagttaagatcccctgaatccacatgagaactaagtgtggtagcccagccctggagagctgggacaggagaatctcgggatttgctggccagccagtctattgaaatggtgagctttaggtttagtgagaaatcctatctccaaaacagaggaaagatcccagtgtggatctctggccttaactcctgccctcgtggttaagatacctgtattcacatacacacacacacgcacgcacgcacgcacgcacgcacgcacatatacacctacaagtagataaaaacaccttcaatagctccaagtgcctatagcaagcctggcaaggaaaggagccctggctattttgttttgcatttgactactgaagatggcagtttttctctcgatcccatattcatttggttttggtataccccacagagttgatactcgaagatgctcagaaaatcccttgcagaggattctgttggaaaggttagatactgagatgctggagacagggacatggactcactggccccaggagtagtatcctattctgggaaaccatgttctctgacttgcctctgtctcttccttgactttaccatctaagatacctaaccaacgggcagccttccatcgagcggtttcccatcagctttaaaacctatttctcaggaaactactttcaccacgtcgtgctggggatctattgcaacggttactacggctcactgggcatgagccgaagggctgagctgatggacaagccactgacctttcggactctgagtgaccttgtcttcgactttgaagactcgtacaagaaatacctgcacacagtcaagaaggtcaagattgggctgtatgtcccccacgagcctcacagcttccaacccattgagtggaagcaactggtcctcaatgtctcaaagatgctgaggtctgacataaggaaggagctggagaaatacgccagggacatgcggatgaaggtcagtgcgggacaagcgtggagagagacaagcgtggagagagacaagcgtggagagagagggagcttccttcccgcgtggagagagtggagctcccttcccacctgtgtccattattttacacacagagcaaaatgtctgacccgaaacatggaaagggaaggagaattcatcttagttcacagttcaaggatactctccatcacgggatacaacagaagcaactgtgtgcacagccggggctcagcttgctttctcctttttattaagtttgcttcagcccatggaatggtgctgtccacagtactgtgagcttcccacctcaactcatccaacctagaaacttcctcacagacacagagagctgctttccctgtgagattcttaaatcccatcacactgagaatcaagatctaacaatcacacactcttttttttaaagattttatttattatgtatacaacattctgcttctgtgtatatctgcacaccagaagagggcaccagatctcataacggatggttgtgagtcacaatgcgggtgctgggaattgaactcaggacctctggaagagcagtcagtgctcttaacctctgagccatctctccagccctacattctctcttgctttttctaaatggcaggaagttttccttgcttagtgaccactctgtcaaaacaaaccctctgcatcctcatttgattggacagttagtctttttttgtatgtgagatggcctgccctggccaggtgcctgtgctgagcttgggtacatggtactcagtatccattcttcactctgtcagctcaattccatagtgacagcatgcccacttgtccctgtccctccagggcctgtggagtcactaagagaaagtgactgtcctgactcaggcttgcttaccttcagtcttcaggactggagtggtgatactggtaaaccgaagctcgttctgtgcctcaatgtgggaaagggggtgaacagaagttggtttttggggtgctgcaggggagatgttgccttgcagggtgagaaacttgtaagcgcacagctctaggaggctgagggcctggcttggttccctcactccacagagaaggggatgatgtggtgttccatgtcactctccaggacatggttccctcatcttttcccagtgtcaagtgtgaggttgggctgggctgttgtgttgtgggaaggtggggctgggggtccttaggacccagtgtggctaactccttctatttctctcagatcttacaacctgcaagtgcccactctccaacccaagtgagaagccggggaaaatccctgtctcccaggaggaggcaagccagcccctcaaggaggctcggcaggggagacaaatcgtgagtgccattttctcttccctaacacacagagtcccctctgagaagactgtccctattcagaggtcatgcatggggaaggtgctatggtgcacaccacccccagggcggcagtcagctaaggatgagttgaacatagagaggggagaacactgggaacagaaccaggagcttgggtctgttgggcctcaggttagctacttaggagctgtgtcaccagggcgcctcttccaactctcttgggtgttgagtttgagtctgtcaatttcatagacctgcattcctctgtgcccagcagggcgtggttgctgtgagccttgtgatacagggagcttctagactcctcccccttggctaactaccctaggctagtgatgctgcaactcttccgtacgtcagaatgactcacctaagacatgccagttgagtgctgagagtccccagagtaactggggactgcttgctagcaagtcctcgggccatatcacactgaaaatttgctgtttgctaaaataatggcagtgggttgtcactgtggcctcttgcaaactgggacctggggttaggagtcttagttgagtgcctgctcagccacatggtagccgtgtagccaagcagaacctggtcctgagggaagtcatggttttgcatctggaagaggctaaggaggtttctaattagatcccatggtgggtgtggcttgttactggtaaactgctttcataaaagcatgttctgattggcacaatcatcacttttggatgaaaaaagcagaacataaaaagagcttgttatcttggtcctaaccctgtagctggtcagtaaggagccaacacaattccctggactccaaggatgtggtgaatgacaggacaggacaggacagggtaaagtgtcttcagtcccaaagaagattgttcttcggtgcacatccaactgtcagccccaggtgtagcatggacagctagcagaggcttcctggagtgaccttgacgtcaccctccccatgccttcccctgaccttgacaccaccctccccatgccttcccctgaccttgacaccaccctccgcatgccatcctgtgaccatgccatccaggagggaaggccctgttgtctggtctatgtcctttctgtccctgaaggaaagtcattaattcctttgaagctcccatgagcagcaggggttgagctgcccacagggggtgctcttccctctggagctggacgagcacataggaaaagcgcctcctgctggagcaatgggtctctgcacagaagggctgccattggcaggccagcatttgtgagtcaacgtttctggttggattgttgcacggaacccacaggaactcagtgcagacagtggtgtcctggctaatagagtaactgccagggaactgggcagggtagcactcgggatgaggtcagaggtctgatggtgatcgtttgatgtagaggacaccagcaagtgataattgagactgtggtctctgaagtgcttctcaggcttctagaaaatattctcaataatagggtttgaggacagatttaaaattggaggcatctagccaggcggtggtggcacacacaggcctttaatcccagcactcaggagacagaggcagagggggaagtttgaggccagcctggtccacagagctagttcctggatagccagggctatacaaggaaactgtctggaaaaagaaaaacaaaactggaggcatcaacccagaagtgacagttcaaacagcagttcataggtgaggaaagaaaaagagacagaaaggaatgagtagctcagaggaggccagaggaagaagagcagggcaggagatgagaaggggctaaggggctaaggggctaaggggctaaggggctaaggggcagtctggctcaggggtgtgtgctgcccttgtcaccccgtccccatcccactctgggaaccctctgactcttctcctgcccacctggtgcatcagaatgggcctgggagtgagggtaaagagaaggagccaagtcaagaagaggggttttcttttgtcacgcccctccctttacacccccacggttcaatccaatcccagtgttgagagcgccagaggaaccatgtcgaggactcacagcccagcagcaaaagtgtaaactcagaaacagcataaatagtgatgttctgggaggagcagatcctgaggaagttatgggtgcagtgtgaaggggtggagcctatgaaaggaagagtcatggagggagacgggggaagagagcacacagaatgagccctgagctgagacccagcgaccagattcagcacagtgagccaaccctgtgacgaggagaggggaggttgcgcagattctttaagtagtttgtagaatatagttttccctctggattttttccttgcagaattgaagaaaatgatactgtttttggagacaaggtggaaataaccaggaggaagaggtgaaggttcaaaaataaagtgatgaattcaggaagcaggggttcgggggagccagggtcagagcggtgggaagtgaccatgagggcagaggggggtctgttggagaagcttgtgcctcgtggccttgtgctggggcaaggaagccatgctgtctgtgaggaaaaaagccctgggcacagattggacagggcccaggctaaggacttgactgacaaggaggatcctggttctcagagggaccttgttccaaaccagaatggggacgggcactctcccctggagcttctgaaccagcaggacagacatctgaggttttatttctgacaagtactctgttctgttgctgggggtgggggtgagaggggcttcccagagctgttcagcagcagattcatctccgtctgcacttagtgaacaaggcaaagggcttatatcaacaaccaacatgccaagacaaagtgttcaagtccagtcactggcatataccttgggcttgtccagtgctagttggtcaccagcgtacaccccagacttctccaatgctggtgagtcaccagcgtacatacaccctggaattataacgggcataacttggctggcctcatgctcagggcttacttaattcagtctgggagtgcccactaatttgccatgactttctttgctccaggccctaatctctactactttgtcatgcagccaaggcaagcagccacactggcgcccgccgtcacctgcacccaaggaagacagctgttagacagctatggctgtgagtgtggagctattgggtgccagggccccacttgtccctgcccctgctgacaccctagagggccctgagaatagaaagaccaggggggaatgagccccaggtgctttctgtcatcaccccaccactgccccccaaggtctatctcagccgctgggaggcaggcacgggccagtatattgtaaacttctcaaggaaaggtgggctgtctgcaccaagctgagctgtctgtccaaggcccccagatccatccccatatccatggccttttcccccaggctgagcaggtttccagggtccctccatgaactttttccagtggggtaggcttgggagggatctacaacgaggccaggtggctttggaacagcacgatcatgaagggccccgaagcctgtggaggcctttggacagtttcacaggcacgggtcttataagggcatggtccctctcggcatcagagaccctggccgctttgctctctgtctgcacttggaggtggggaggagcctcgaaagggcagccatggaggcttgcgtttaaagtggactgaggtgagtgaggagggaaagccctttcagcccagctcctctgaatccttgacagggacaggaatggggaagggctggtgctgccacgcaggagaggggcagggaaggccagaagcaaaataaagactgcagaggagaggaccataggagacacggagactccaagcccaccctccctctgctgacttatacatctgccatagcataggctagaccagcaccctggaccttagacatgtgtccacaagggaatcttctttcctgtccatagctgtctccagcaggttgtccagctagcttttcttgctttttaaagggcataggtttgaccatgccccagtgacttcacagactttggccagtctctcactgagctggtcagcatcaggaagggctgttgaggaccactgccatgctattatttcagctttacctaaggccagcggccatctctaaacacagagtgctccaagtggaaaataaccacgatgggcatgaggctcgtcagctggggacccatagataattttggtggcttatgtcaccccttctctcacagctagaaccacttccagccctacattcctctctgcacttgcctgaataatccctgcagggtgtctgtgccactgggttgacacaagagtcttctgagtgagagggcaagaatgacttcacccctggattaagatcaagtttctaaagggagacagcacttcccttcccgctctcactctccagcgggttcttcctctctcctctgagggttccagtcttctcactacttacttgtcagaacatgggtacatgtgtacatgccaagggcagagggcagcttctgggctcttagcttccgctgtgggtcatcaggcgtggtgatgtatgcctttaccttccgagccatcttgcaggcagtcttcccctccaaatgcagcaagcaccttcttcataaaacagtcgagtttctttccttcttaactccacccccaggggttcttaaagagaactgggggtgaaacttgggttctgtgtttcaaagcctgtgtcaaattaaccaaccccttcgcaactctgggacttggtcccctcaatctcttttctgagggttgcccacagtgaattgtgggtggggacaactcaaagagagcaggttagagaagtcaggagagccttaggtggtgatgcatcagttgttccaggtacttgagaagtgggagccagggagatcacttgtatcctcaagttcaagaccagcctagactatattgagaaaatcactagaaaagaaagagggctggagatatggttgagtgtttgttgcacaagaatgaagtcctgagttcagattcctaatacctaaataaaaataaaagtagattaggtggagaagcaattgaggcacacaccaggtcagtggctggcctccacacacaattggacacatacctccacacgcacacataaatacctacagggggagaaaagagaaaaaaggaaagatcgcgtcttcactgaggtctgcttccccaaggacagagcaaacctgttttctctccccttgtggctctgctttacctggccttcctccttgttcttttatgcttcttccctttctctttcttgagcaacattgttccttttagctatggacctgttaggggtcatggtgagttctggaggccactcttcgaggcttgtaggcagtggttctgtttaaagcagctgatgtctagagcatgactggaccaaaagaagccatcaccctgaaggccttgagctcgtgggaaagctgatgaggtctgcacacacatttccattcctactgtgcttatcattgtgagtgtcccaggaacctggagaacagacactaatgtggcatggacccttgcgacagaggtgactaagatacaagttctttagtcaggtcaggtagcaagttggaagatttcttgaccactgtgaagttgcttcagagagaatgatcacaggtcaagatgtcagaatctcttagcggctacttgagaggctgaggcaggagggttccaagttcaagtgctgcctgctaactcatggacattcatctcaaacacaaagtgaacatacaaaggtgtgttcagtggccgtttgcctgacaggagaatggtttaggatggtcaaggccttctcagagacaaaagctgctaagctaatggagcccgctgctcactcttagtgagctgcactgctttcctgtaaagaggaaacagtttgttatacggaaatctttcaaagggttaaggactttctgacacttgaattttcacttgttagcacttaaggtcaaggttcgactgccatctttgtcatctctttgatgctcttaggaaaatagaaaaaccctgaaggggaactcaccagcatcctaaagtcacacttaagttttggtcacatcaacccaaggtgacaaggggctcatcagaacatggaagatgggggactggagagatggctcagtgggcaagagccctggctattttttcagaggtcctgagttcaattcccagcacccacatggcagctcacaactgtctataactgtactcttcgggtgtgtaaatgtacctgcagacaacatgccaataaacataaataaataaatctgtaaaaaaagaaaagaaaatggaagctgtcagatgcttacacagtgtcatcctggaaagccgccagcaccttaagctagtgttcagttttagtgccaggtgctttaggagtgtcttagcaaagatgctttgccattgagtgattttctgccatggcatgtggtttcagaattccaagagatatgctttgtatttttatttttttaaagaaggggtttctctgtgtagctctggctgtcctgatactcactctgtagaccaggctggcctcaaactcagagatctgcctgcctctgcctctcaagtgctgggattaaaggtgtttgccaacacaccttgattttacacattcaagcctagagtagaagcatctcccaagggtaactgagaatgcccaccagaacctaagtccccttgtgatcccctggctcactgttgccaagagattttggcttagtcctgtagtgtgactttgtgaggatctgagagatacagggtttcaaaagttgtagtgctgagcatggtgctgtgtatctacaatctcagaacatggaagattctggtaggatggatagttcagggctaccctgggaaacgtagtgaaaacttgtctcaaaaaagtagagcctgattaattttgccatgatgtttatttgcaagattttttaaagttaatgttaattcaagtttaaaaggttcatttgataccagaagcaggtgagtatcaggcccctgagaagcttcattcctgtgtgggtctctctccaccgtccttctgcctttactcttaggcctgctctacctgagaagaaggtggctgacctcagcactctgaacgaagtgggctatcagatccggatctagccacgccagctggtgaggcttccatggtgctcttttctgcactttacccagcagcttcaggaggacctgcaactattcttgaagaacttgtggagttttgattttgaaggacttaccggcaaacagagtctgagtgggtggaaatggtgagctttgaaaaaactcaccgggcaacaggcatggctgggctgaagtgatggacaggcccctgggttgactgtctgccacactcaggatctcaaggacaacactgtagtctatttttccatttgccgactgttagcttgctttggacgctttgcctcagctgtagtcaacttctggagttctctcccagtctttgtaacgcagtcagtgttaccgtcttctcagcaataacaagcaaagatggtgggtttttttagcagttgatattacctcaacattttggcatcagatatgcaatcttaatgagttttttatattctatttgtattgttttcctagtgtttcttatagggatcttgatggtttggcgggtttggttgttttgttttttcctggtgcacatatgagatgagatttaaggtgccacatgcaaacgttttagcaaaaggtactgcaattctggcaataaggggcaacacattaggatactggagtcacttaaggcatctgctgactgcaggttttcctctttcaaaacaggcatgctaacagctctagtccatgttctgctgctaacatttaaggttttccaaatgcagcaaaaagcacaagaggccacacactcacgaaaacccagcagcgccgaagacctctggcagaaaggcgcttgaaaaagcagacattgggagctgactgttcgttcccgtttttgttagccctgactctgaggggctcacggttgttcatgtgttctgctgtcttacattaaggcaaatgtgatgatggactatttcccagtagcttgttttcaggcaccacttcatggctttaggaagtgctggggaaaaccgtgaactcaaaaagcaggctgtcttaaaagaaaaggtccaccagagtgctatgcctccgtgtgcctcaggccctgaagcagaatgaggctgcctgtggccggtgcagtgcatcttatgcttttggatctgaaggcaagcaagagtgctgtaaatctgtagtgcagctttaaaaagtcactgatcttagtgcagccactacgcctgaggaccagcttgtccacagagcttttagcatgtgcttctctggctgtggttgacaggttaagaggccctgttagctgaccactcactgagttttcacagggaagacctagagccacaagagaggcaaaagctgtgggcacaaagactcactccaccctaaagccaacatactaatgaaaagtattgttttcttggaaaaatttagtgtcctttagagaacaggaccagggaactaaaacaccaggaaagtttccaattccgaacttatggctttctgtaagaaccgttatcagagttgcagatgcggtcctgggcctgggcgagtgctgggaggctgtgctctgacagggcctaaggaagactcttcctccatgtgccctcaaatgctgtccattctcagtgttgtcaagagctggggagtgctttcactcttgctcagctgtttacccctgaaacacctccatctggtacatggactgatcagaattgggccaccaggccaagtgcctgcagctgccttgttcaaggtcagtttatgtgaaaaaagtcagtgggacaaccttgatccacggcaaggcaaagaatagcacgcagctgtcctggagtatgactctttgttatctaatcttttccacaaacacttctgatttttagattcatttttcaaagcaaggttaatcacagaaacatttaaaatgctctgtcactcagtttactgtctgtagttacactaacttctaaaaatagaaggagtcacaaaatacctaaatcctaatgcaggagtttaattaaataataaaatggcaaaaaaaaaaaaaaaaaaaaaacgaacccagcgtgtattacctctcctcagcatgcctgtgatttaagaagacagagaaaagtatgaggtgacaggagcaggtttggcctatgcagtgcagatgagcagagtggaacaacagtctcaagctgactggctgctgactgggaaaggtgatcccaggggttttccctatgctgaaatcatgagcacatatgtcccttttcttgagtcagtggtttcatagggtgtcctcagcatacatggggaacctttgcaacccttcagcttactctacaaggttttcctatgctagacttttatgtacaaccttggacagttttgacatacagttcagattcttttttattttcttagactttgttcttgccaatacattttaaaaatgtttgagaagagccgtgactgttttagtgagtatttttctaagtacatgaagacttgacagtgctctggaggacgccaggagtgcatgtttcaggcttgcgtgtctcttgtcacgtgttgtacacagcatggactgtaataaaaaccattctggaaactgaagggctttgagaagttctgttgctgtttgtcctgttgagttaatttacccgtttctccctttcctctttcaggctttgttgaacattactctgtttgggtgtatttgtcacttgcctctgacctccatccttactgacagaggctgcgaaggtaatgggacagttcaggggtgacaggctggcttctactactcatttaccacaaagcccaacacagatgtgcaaatataatttattacagcttacaggtacaaagtacaaaggactcaatgccttagaacttttttttttttaaacaaaggattaaaagttagcagatgctaaatcccaaaagacaaggttttgagcatgcctattgtcttgatggcaaagggtgcagtaaaacctagactatccgctgggcggtggtggcgcacgcctttaatcccaacactcggaggcagaggcaagcaaatctctgagttcgaggccagcctggtctccagagtgagtgccaggataggctccaaagctacacagagaaaccctgtctcgaaaaaccaaaaacaaacaaaacctagactatcattactcttcagtttccctttgcatttaagacttggccagcaagaggctggggagatggctcagctagaggaggacctgagtgtgagccccagcacccacatgagaagccaggtatccacatgaaggaggcagagatagagtcttggccttgctggccagcttacctactttgacatgttccaggctggtgagagaccctgtcgtagaaataaaaggcggttggctcctgagaaacaacgcctaaggctcacctctggcctctagacacacacacagtgcacaccttaagactgtgaggggtctgacttctaaagtcagccagatcagagtgagtgtgtgtgtttgggtgtatttgtcactttgtgagtgagcgcacaaagagacagtgtacactttagattggatatccaacttccacagccacctcccccctcccctctctctctctctctctctctctctctctctctctctctcgcacacacacacacaatacattagactgtgagatccgactttagcagtcagccgaatcagattgtgcttggcaggtaaacacagggcccagaggagctgccagctcttctgtcaacaacagtagagaaaatagatcatttttattggagctttaaaaacttgtgaaaagtgtctatgaacacagattaacactgataagctaacagcaatttatgggttagttaactgtatcaaaatgaagtacatgataatatattatgagtaaactcataatatattcatcaggatataaaaacattttacagcggttttcaggaatgtcagtttgccaacaatgatgtttatactaattcactcaacatccccctaatattaaaaagacagttaccactgtgattctaacaggacccttagcactccacaaagcaccactgtaaaactgtgggcatctgggcattgtggtcactactgtccatgaaaacaatgagagtctttctttactacagtgctcactgtgcatggctatagctacaccactgaggcagtcatctagaagacctacagtaactgtaatcaatgagttagaaatttaaattgccaagacttactaatttaaaatattaaaactcacggtagaaaacatattttattgaatggtaaggacttaataaaaatgcctataatctaactctactgtattagacagcagggggaattgatacttacattgaagtcttttaatcgacacttgtacagggtttatcagacctgctgtgagactgcatggacagtgtgagccatgccaactgctgcaccactgtaccagaatggtcaacactgcagccaacagtgaatcagtctgtgaagagtgggtgtggggctcccaggtataagccgtgcctctctacactctggcttctgcactggaggcgaatgacaaatagcagtagactcgctgcttccttccgaagaccttttctaatatttatacaaaattgtttcaacaaaatgtcactcctgacccaagggccttctactgtcattaaacacaaagggaagtgcaggggtatgaggtacaagctagaatctgccatctttctgtctttgagtcagggtcttgctgtgtagccctgactagcctggacatgcagtggccctcctgctggctcccatccacaggcaacatggacgtgcatggctgcacctggctcatctgctttccttggggcaactcctgtaaaggacacgagtggacttatataaaggcctctgactttttttttttttttgagtgtgttttcaagacatggtttctctatgtagccctggctgttctggaactcactctgtagaccaggctggccttgaactcacagagatcgcctgcctctgcctcccaagtgctgggattaaaagtgtgagccaccaccaaatggcttttgttaactttttaagaccaggtttcatgtagcccaggtggcctcaaacttgctatgctgctaaagctggctttaaatggctaatcctgcctccacctcccaaatgctaaggctacaggcatgtaccatcatacctggctaagagctttgccctcttctgagagtgacctaacaaaatgtaggcatatcccacagctcaggatggcagtcacgtgggtcagtatgctctacaacgcaagaacatcatccagcctcttcagaagctaatgtggttggacacctgtgaatgaatggcccagggatttctaagaattgattagctctcaacaagcacaggcttctcccagtgaaattaggcctccagaaaaggcaacaacctgagctctgcaagttctgacaggtccaccagaaagcactgaattcatacctggagcgctaaggagatgaactacatttttaaaaaatgttattaactttaccaggactcagaagctatttatatatttttataataaagtgtttagacatgtcagaaaaatatttcataaaaaaacaaaacaaaacaaaaaaaccctgttgtgccaggcgttggtggtgcacgcctttaatcccagcacccaggaggcagagtcaagagatctctgtgagttcgaggccagcctgatccacagagcgagttccaggacaggctccaaaatacagagaaaccctatctctgaccccccaccccccaaaaaaagtaaatttgtttcttcccatctctttcaagcatatagcaaattctgaaccacacagcacaaaaatgaacagcatgcaaacagtgaaaaatatctttacagcctttgagaagacaggaaattgtgtaagtgagcaacagagtcagagttgaagcctgaacttggccagtagaggcaggtggtctgaggagttgtgttcattgggaagtccattcacagtccacaggtcttgctctgtaagaagcgacagtctagctagaagtttcaagcccccaaccaaagcaacttcagctcctaggtgaagaagtacatattcagtgaaactatcattaaataggcaagttttttaaaacagtgaaacggaacctgaagccaccagaaaactaatatgaaagtttttagagtacaaagttttgtgaagttataactaataacccttaaactgtagaatcatgctgtttgtgccaggtaattcttctatctcaatttataaaatttacacttttgaaagaataacgtaataaaaaatgttaagaatttacactgagtggtggtggtgtacacttttagtcccagcactcaggaggcagaggcaggcaggagtttatggccagcctggcctacagagtgagttctaggacagccagggctacacagagaaaccctgactcgaaaaacaaaacaaaaagttaggaatttgagattgacaactatttaagaaatgagccacctagctgggcagtggtggagcacacctttaatcccagcacttgggaggcagaggcaggtggatctctgagttcgaggccagcctggtctccagagcaagttccaggacaggctccaaagctacagagaaaccctgtctcaacattccccccatcaataaataaataaataaaggaaagaaagaaagaatgatccagcaaactacttaactgcatagagccaagcttggcaggcaggagctgccaaagtgactgcaggatgaggggacatgattagagcccagtcattgtccactcaagtgaaaggcagcatgctttcagctctggggagactggaactactgatccctccctgacactctcctgccacctagtgaactgtgtaggcatggcaacttccagactgtactgtgaactgagagcagggcaactggacagaaggcactgcccagaaggaactaactgggagagaagtagcatcagaaaagggaatgccttgtctaggaccccagatattttctgagtatttttagatttccagttatctcaatgtttcctcagttttaaaaccttcagttggcttattcaacctgattttttgagttgtaagggaaatacactcctgcttccatttctgaaaacagtcacaagctttctccagcgggtcagcacccaggtcagcatgacagtgccatgacaggccagcacagcctggccctgctgtgaaggcagcatgactttctaacctaatgaatggcagacagctggtgacttcaccatctactcagtgattggcactgaccggccagctgaggacacacttctgtaagaatctgctgggctgctttacgatgtgtgcattcatcagggtttcacacatctcgcttctgcatttagaacttcaccttcgtgctgaaactaaggttccctctctgtattactctagcaattgtggttccacacactcctcacctggacccctggaagcaccctccttctctgcagagtagaaaatgtaatccacagttatggcgctttgggaatggcaggtggtcacctctggaagtccagtgtcaggaaggtaatgagaatagacagatgacaagctgaagtggtgctgcagatgtgaagacacgctacagcgaagacagagagaagggctcagtatccaccaaaattttcatagtaaaaatctctcatctaaattacctttttactccattcctagactaagaccaggactctttttattgtttagtcttttgattttgtttttcagacaagttcttacattatatcccaggcttgagtgcaactttcgttacagcttaggctgtcctcaaatttatggcaatccttctgtctcagttgcctgagtagtggtataatatctgtaagccatcatgcctggcttttttgagtttcattatgtagctcaggctagcctcaatcttactatatagcccaggctggcctccacttcatgacacttctgtctcaacctcctgagtgttatgacaggtgagacatgtttcactgaaataaaccatatcctaagtcggttcctttactgatgcagtgactgtgaatgaatgacataacccagcaaatgacaacaactggggtgaaaagctgaagaatcaatatgctaattagatcttagagtgataagtgtttgagagcctccacgtaaattctaagcatgcacttctcaacagctttttaaggatgctctaagtggtgaaggctgtgcaaggctctaggaccctctggacctctgctagcaaagaagccacaggcctgtatccttctgctctcaggacagctgccagagtggctcacatttactgttaacaaatacatgtcctgtcacagtcaaaagggttaaagattattttctaatatgtcatgaattttaagagtgatttatgctaaaaggaaaaataattttttagaacatttttaagttcattcaacaaacacttaacaaacatctactaaattctgtacactactgtaggtgctaagggacacattaaaaatgtggctcagcagttaagagcactgctgcttttccaaagtccctgggttcaattcccagtacccccatggcagataacaactgtctataactcctgttccaggggatgtgattcctgcatacagacatatttacaggcaaaataactatgtatagaaatcaaaaagttaatttaaaaaagtacaattttttctcaaactaacacatacaaagtaaaactgagaagaatgaggataaattgaaggagatatgcttctaatgtggtccctacatttaaatgttgaaaaaacactgggttacaatctaggataaatatcttaagaattttaaagagacacaatataggtctgtcttgatgtattaacacagacccacttctcaataagccagaacactcagggatctttttaaactaatacaggcttctctctgcttctgatgtttttccttcagttcatgggaaaatgacgatgacatctctatggcatggtgtagactgagatctagttagtgactctggagttttcagagcttctgggccagcccaggcccacatgctgtgtttccagacactgcctaagcacaccaagcaccaagcactgctttccaagctttggctccctgaatcctcacaactcatgtagggaaatggagccttagtgatgcctggttctcagttatgaagcagcagtaagacgggaactcgtgtgtgtttgtcttaaatccagcagcctttgcctcgtggaatatcatcagctttattttggatccaagtgttttcagaggtaatttttttttttgcatcactcagtcagggactgtcactgtggctttccagaactcacttttcagctgacattaggacctctgtcttctccagctgtgcttccgtcagatggctatcgctgtctgaaagagcagaggtaagcatgtcaatgcagtgtgcatactgttttgttctagtttgccacagcatggctttctgtagagccagattcatgatatgtctagtttagatgtctggttagatatttgatcctatggctatattttgatggtctacagaatcaggggggggggggaatgcaagcaactttaaggcaatatgcaagttattcatgaacaaataatgttggaatttaacttttaaaaaggaaatttgaaacagattaaaaggatgagcaaatagctatttatatttatatacgtgaacatttatgcccaagatgctgaaactgaaattttagcctatgtctccacagggaagaccattacccagaagactgccaaaatgtactgcaaacactcacctgtcttttctactctgggaacctgctgtgcctcatatacacaattctgagagatgcctaggtttgggggccaaattggaatagataaaattctctgtccccgtgaagactgttcctggccagatacctgcacagaatttcaacaggcaccttaagtgaatagacttgaactaattatatgttgaaaattttatatcttaataaaagtaatcagaaatggtaagcatagccttcattttaaataaatgattacttgtgattacaaactcccatccaaatacagttcagaaagcactcattatttacatggggatcataggcttttcacacacgtgttttcctcttctgaacatctaggtatctacagcttccaactaatactgtcttactctttctgctccttgtaatatagtttctactgtgtcaaatgctgtgattgaatcaaatttaaaactcactgaaaatactgttggtggaggacttgttctggctaaactggaaaccaaatgatctaaaacaatcagaggaaagcatggaagtgtcattcaaagctgaaggaaataagtatttcagcgttacagaagacattcctatgtagaggaaagcttatacaataaacatgaaatgactgtactgcctgtgtccagcattcagaactcctcctactccccacccccatgaaagaggcctttcaagttagccttgtctgtcaacacttttctttctaccagataattccttcaaacaaaacccttccaaactggacatgacaaaaatcaaaccaagtgaacaaagccatatattcgtaactgagatattagactgcccagtggttttcacacagccatgcaacgaccatcttcactccaacaatgaccaactgaccctctcattctgatgggtggagcggctgaagcccacttcctaccagacgaagtgagcacttgcctttccaattgcaagtccttcataattcagttttccttcctttatgaaactatagagtggagaaccaggaacagaattaaagtcaccacacatgacgatggggcagaagctaccgtctttcctatgggccacactggaaatctctgcaagcagcattgccaattgtgtgagcttaatatctcctcgccgtgggttatacagcagatgtgtgttagccacacagatggagggggaggcagcatgtggggtcctgggctgcaggagtaacaccagtccgatgttgtccctgtccagcagtggaatgtcacggcggcagaactccactgggttcactgacaggagtgaaaatttggagtgtttgaagcaaatggcacagccgtcgggtttccttcctgtcttcatcttatattcacagtgataacctacaaggggtgaatttaagagaaagactgtatgtcaaagcacatccctcttgatattttatagcaatgtttgacaaagcacgtgccgtgagacaggatgctagcctgtgttaaaaccgaagcttagggctagagtcaggaatgtcaggggagagtgttatagcttcagcatctacaatgtaccatcttatttttttggtggtgggatcaaacccagggactcaagcataccatcaggcactcttccatgggtctacgttcccagctcgagggtcttctgggacagggactcaccatggatttcagctatcatagaacttactatacagctcttagtggccttgaactcttgatcttaaggtctcagcgtcccaagtgctggaactacaatgaggccaccacaccatacacctcgtatgtctaaccaagcagagagcaggctcacacacttgtaaggaggtgggtgcattatgactctgagccaacctgggtcatacagcaagaccttatctcaaaaccaagatgcctagcagcttcctttactggtagacttaacccccaactcagtcatgacaaagacaatgaggccttacactcactcactctggtctttctgccctcttttccccatctcatctctgtgggccacattgcccccagtacatgtcaacatcagagcctttccgtgctagctctgctggccaggatgctcaaccttcacctcctccaaatcttagttcaagcttcactttgtccaatcattctgcattccttgcctgctgtttacgtatgcacgtcacaaaggaggctggctgctgagacagcattgtgctcactttctggatcagtgtaaagtataggcaggcattcaggaaacacctactaaatggatgaatgacacatgggcatttttatatttcctgtctataaatcaaattctagaaggctttatcttttatctgcgaggccatggtaaagcctactcttgacggcctggtccctgatcttgtgcagcaaagacctgcagagacgcagcagctgagtggctcctggaaacatttcccttttaagatcagatcaacatgagatttccagcagaaatgcctcaatatttgctggacattaggaaataggcatcacatttttaaaattaagagttatcccaaaaggcactggagatggctcagcagttaagagcactggctgatcttgaagaggacctgtgttcactgacagtgcccatatgctagctcgtaactgctagcaactgtgattccataagatccaatgccttttctggtctctacacacttgagcctcacacatggcacacagacacatatgcagacaacacacctataaaataataaataaaatttattgaatttaatgaaattcacaagttatcccagagctagagagatggctgagtggttaagagcacttgttgctcttccagaggatccaggttcagtttccagcaccacatggtggctcacaaccacctgtaactgcagttccaggacatctgacagccctttctgacaccgtgaatgcaggctaaacttacacacacaaaaataaaccttaaaaagttaaaaaaaaaaaaatgccagtaggtggtggcacacatgtttaatcccagcaaaagtaaataaaggttacattgtacccagtgattccagacttggcctgatctctgttccataatggtcttcttgaacttcctgcagacagagcaccttgaagaaaacagtggtttgaattaaaacagatccaaatatgaattctattcatactgacagcgtggaaatcaaagtggctatatatatatatataaaataataaataatgctcattatttttagctttttttgttagtttcttcaagacagggtttcttgtttctttgtatagtccaggctgtcctggaactcactctgtagaccaggctggccttgaactcgatctccctgcctcagcctcccaagtgctgggattaaaggcgtgcgccaccaacgcccagccatgactaagcttttaagtgtcactatataacccagagcagccttgaactcagagtggtacttctgcctcagccacatgctagattatagacatgtgctagattatacacatacctggcttgggagattttatttttactttaggtatgaatgttttgcctgaatttctgtgcaccatgttcatgtagtgcccacagaggccagaagagggcgccagattccctagaactagagatacagatgtttgtgagctgccatgtgggtggtgggaattgaattcaggtcctccggaagaacagccagtgtttgtaagcacttagccatctctccagccctatgggtactttcctaagaggttggtttctttccagcatccctcctggcaaaaacaaaacaacctgtttccttagctgggcatggtggcacatgcctgcacttggcacaggagttcaaggtcatccctgggctacacaggaaatgaagccagtgtgagctgttagaagtcctgtcttaaacaaacaaaaaaaagcaactggcattctttaaatgctatctgaccatgtagatgaatttgtgcacaaactagtgaaatttcaattccaataatttacttaaaatgctccatctgatcctcaaagttgaccaatactttaaaactttcagctcttttgaaaagttaggtgatgatttctcattgaccaataacaaggaagccatacctcgctaacagctccttaccccagacaacatgcagtaacacactgcccaggaatgcacaatcaaccaccctttccttagaagaaaatctccaacactgctttacaacttacatctgcatcaaaatgcttgatttctttcagaatattgggaaaacggaagctccaatgtaacactggacgccggcagtgtctgtagaggtgtgaattgtcctccaatagatcttgtgagagtatattgtaagacatcactgaaaagtcaaacttttcttcactgtcctcacacgtggactcaacatttttgtcttctagctctttcgttttttctttattatggctacataaatactcccaattcctttttattgttcctgttaaaatatattggacaaaatataaaaaaatggatcaaaaaggagaccagatagttttctgtacacaaatactttttcacttaaaactcccaaagccactgagtaaaatgtttctctttgggaacagcaagctaatggtgactagttaccagctgtcaccaggcgggctgactaggcagctcatctttcaggaggctgcatgctcccatttgcctctggttcagaagacttccctcagtcacgcctaacattctttaatgcagtgacagactccacagagccacctttgcagagaggatttctgagcacatttccttccgtatcaagatcaccaggtaccttagttcagaattctggtttatgcatgaacagagggttgtacagaatgaaaatatgtgagaacagtgttcagtgtctaacatgttaaaatggggaagaacagacagaatgaccaaaacgaattgttacaaattaaagatgacaaccaggcagtggtggcacacacctttaatcccagcactctggaggcagacacaggcagatctctgtgagttcgaggcctgcctggtctatagagtgagttccaggacaggctccaaagctacaaagagaaactctgtctcgaaaaaccaaagaaaaaaactatagatgatacaatgagccttgtaatatagggataccaaaacacgagctagcataacattacagaatgttctagacaaatggcagaagctggtgagtgagcttagcatacaaccaccaggtatgcagcatagatcacactctgcaaagacatagtattctttgaaagaacagtgtaaagtagaaaaaagtgagattctgtaattacagacactcctcaactaataaatccattttctgagggtacacatgtgtgaatattttatatgtatgtgtatacatggaatatatgtgtatgtatgtaatatgtgtgtatatatgcctggtggcacatgactcccaagccttccagcacttgggaggctgaagcaggaggatcaaaagcctggtctacatggtgtgttgaaggactgcttgagctatgtgtagtgagattcaagaaaaaaaaaagggggggctggtaattacttagtggttgagcacttgtctggcaggtgggttcaatgcctagtgcccaaactagcaagtgaatacattcacctttgacttcatgtcttattatgtcacattagtcagatatatgcttattgtcatggaagcctagagaaagacaggacatttagttaacccacaaactcaacagtgaggagaaaacctacctagaagagaatagatttggagatggctggccaagcatgctgagggtaaatgacagctttcagctataggctatcttcccccatcctgcacgcaggttttcaggtcactagactataattcctaaaattctaagtgaagttgcctgagcatggggactacacctgtaatcccaatactcaggaggctaaggtaggagaattgccaagagtttgaggccagcctgagctacagtgttgagtcccggtccccaaaaccaaaccaaacaaacaaaaaaggaaacagatctaaacagtaaacttgcatgcagagtgaaaaggaaatatgctaccatgctatcagaaaagtatattatgggatgttcattatggcaggttactttcctcagcgtctaagcatctacctcctgcatggagggttacacatttgaccagaaagagggccatcggtgtgatcagtgagggctgaatgggctgagggaggtcatggtaggaagatgctaagggaagggctccagaaaaaggtggaaagaaacaaaatcaaaatagacaaaaatcttttgacaatacagaattctgcccaaagcagcctcatgcccagctgagccaaagaagttagcccttccctatcctgcattgaacatggagactatcccatcccaaaggcttaaaattaaggctaatggtactagccccatagtactgacagttacaatatccaatcacaaactatggtgtccctgacagttaaaccacagactgaagttttcataagatggaaggggctccatcatgcaagctttcaccccccactacagctccatcctgtcaccacctcaatgaaatataaaaaatgaagatctagaacactcatttgctgtttcttataaaatatgttcatacagtgtacatgatatacatggagattatgttctgctaagaactttgtaatgacacttcttaaataaacaggaccagtggacacctgattgattactatggtggcttgccaactttacagctcgtggagccctttggcattgcttttcctgtactaagaagaccaggtctctgctgagggggaaacacagtgcagcaccctgaccacacttgtttcactaaacagatgcaagtgtgttcaaatgctaggttccatggaggactccctcacaaccattgacacagtgaacagtctctggccgtcacacacttcacaacaaatccacactacaaaagcttatataccttccatgtcaggagcaacaaggtgatcacagcagagaagagagatgaatcaaagaaagtaagcaacaggcctgagcaggtattgggtgcctaattacaaagtcttaattgtgtcacacaaatccttcaaatactttaaagtgataggcaaattagtaaagctgttctcttgattgaaaagtattagtgaaatatcgcaagtcacacatatggcttaacgaagagccttttccttattctcaacacctaggaagaatggatagataaaaagtcaggtagcaattagagattatcagtacatcaatgtaattccccatccagttctgggaaacaccaccaccacagttttgagtagtcacttatgtcaggcatgtagacatctctcattttgtctttaacagacattcaaaacagaaaacctttccacactcgtaaatgaggcagtggcagagcatacatgagggtagggagtgcttcctaaactttaccatgtcaaaattccatctgagagcacacagaattaccaaaaggtctcaagagaggcatgtgaattgtcctaatgaacacaaatgaaaaactgggtccttctgtggatcctggtttcaatgtttcatatgaccacttacttccatgtgctatagttacaagttatacacggccaaggacttagtgtctacttacatatgtgtgcttatttgaactagctctttgtaactgtagcaattaatttctgccttaggacccaggtgaatcctccagagaattttctggcaacaaaggacaagaagcctgaaggcaaagggttcaggagctcactttcagctcttctgcctctgtctcagctccctacacaccaacacccacacagccgcctctaaagttcagtaggaaaggcaatcccgagcgagttcttacatacctcatcacacactgggattagagtggggtgggagtgcatgagttgtctagaagtgaaaatagcacgagaaaagcacatggaatcaatacatatttttaagagctccataaagttgagtaggacatggccccctttctaaaaggtaataatcctgactcttgagtttctaggactgggcatgtagctcagggcacaacaagtacaaggtgctgggttcaatccctagcattgaaaaaaagaagaaaaatatacatataagctattatagactctcatttgggaaatacagatttaacatgctaaaatgttatcctgtaacattttatttatggttgtttcaaataaaagaatccttttatagtatatatttaaagtcactattataatgaaaacacaaaattacattttttagatcagcaatttccactggcagtctaatctctacgtcatcaaaggctcttttcaaaaaatgctggacatgaaaactattcttaaacttttcatttttatctacttctgttttctacaatgttattctacttttatattcttatatggcctaagtatttacacaaactatataaatctacttatatagtctatttatatagtcttatagtccttttctacatttgtagaaagagacacagttgagaataaagacaccattcctaacacagaatgactctctaaaatatccaggactgttatcctgacgcctgtccttttaccaagataaacatctcttttaccatggcgctttcttcgtttggacgagggctcatctttgtcagagttcatgatgtaactggagagatgcatcaaggatgtgttgctcagatggtcaggtctccaattgtagtactgaaactgagttccagactcaaaaagaagaggtggtctacagttcagtgagaaatgcctgctactcaggtatgggtaaggggcacgtgagtaatgtccaggccacctcagacaactggaaatgtgtctgttccagcaatacctctgcagatcctctaacggtgtggtccagtcttgacccaaactcttcagaggatagggaaacatggagtacctagaagaaatagagatactccttgaggtaccactttttattcagctatagtacataaaatccaaactattttctccaggtgagatgtgatctatttaaatttacttctaaatctgtgaagaatggccagtcagtagtgatgcactatagtgatattttgtttataatctaacaaataaagcttgcctgaagatcagagtgcaaagctcactacttactggagtcagtaagtaaggttcgggactttctgagaagctgagagcaacctatgctgcaccctctgcaaaaaacgtcaggatacagaggactcccatcccctggggtttctgtgtacacactgattatcgctaaagggattctgcttgagttggatttccttactacatgcaattttgcattggcaaatatttagctttgattacaaatttgaaactcaatagtctcaaactgctctctgaaccaaacggacagtaaatctttaaatgcactatcttgccattgactatgaaagtcattcagcagggctggagagatggctcagaggttaagagcatgggctgctcttccagaggtcccaagttcaattcccagaaaccacagggtggctcaaaacggtgtgcagacatacatggaggcagaatgttgtattcataatgaataaatgaatctttttttaaaaaaaaaaagatttatttatttatttaacatgtatacagtgcgtgccagaagaggacaccaaatcacattacagatggttgtgagccaccatgtagttgccggaaatggaactcagaacctctggaagaacagtcagtgctcttaacccctgagccatctctccagcctgaataaatgaatctaaaagaaagaaagaaagaaagaaagaaagaaagaaagaaagaaattcagcacttgggcctttttattttttaagttcaaaaagaatttttttgagccaggcatggtggtgcacacctttaatcccagcactcagcaggcagaagctgagtctacagcctggtctacagagttagttccaggatagccagggctacacacaaagaaaaaaacaaaaaaagtttttattttccttattgatacaaactgggtaccaggcaagacaggctggtcttgaacacctccagacagacagagttcaggaactgtccctttccatcttggtatgtggctatactgcaacctgaactgtgacacttattctttggattggcagttacttataccactatcttttctgaggaccagaccctctatttactttaagcgtggtctctacccaagggccgcacggtgccaggcacaggctggtagttagaagacactgaggaactggactgccatgggaacctggcataacggagtttggcagatcccttcggcttatgtaatgacgctgtgctatttcccacgcgtggcacaccagacggttctgaaggttacacaaaacctttgaactctcagcatctaagtctttcaagtttattagagaggaaaaaaaaaaaaaaccatcaccggtgcatcaaatctacgcttcggcgggcactatttggggtgatttggggtgacgtcaatagaggcggcgtgtgctgtggagctttgtttttaattttggaggcggagttttactctaacccaggccaccctcctgcctcagcctgccgggagggtgtggagtctcgatgagtctaaagacaggcacccggggcgcgcggggtgcgagccagtgggtgccggtgagaacgtggcctccgccgggccgaagtttgcgagccgagggcacgcaggggcccagccaccccggggccgcggcctccctgcaggccgggcctcgcgcgcgcgcgggcgggtggatgggcgggcgagccggcgggtgggcgagcgtggaggccgcgcgagggcagccggaccccggaggccgccggcccagccgcccgtccgcgcgttacctctgcctcggcgccgccaggcgcgtcccgccgcggaccctcttcctccgccttcctcctcccgcgcccctgccccgccccgccccgggccgcctccgccctccgccccgggccgcccgcgactgaccggcctcgccccgccacacagcggccgtagcccctcctcacacagcgccacgtctccatgttgactgtcggcgcgagtctagcgcccaggcccggcggctgcgcctcagccccggacgctcgcagggccccgccggatccccatcgctccggctcggctccggctcggttcggctcggttcggctcgatttggttccgccggccggccgctaggcatgctgggaggagggtctcgccgcaggccgggccgccatcttggcttctggggccagtcctgaggcggcgcgaccaccccccaggcatgcgcagagcgtgcgcgcagccacttccgcgtagggcaccactcgggaccgcctcttaaaggaacaggaagctgtttccggacggctggctacctggacgccccgtctgggctggtgccgttttaggtgccggggcgcgtccgaaaggcaggtgtcctcgttgaggaaatactgttccgtgggggctcccgtagcgcggcgggcctcaggttttcatcatcgcgtttgaggaggaagtacatgttagtgagtttcgccggagaagagcgagttccaccatgtccgcccgggccactttaaatacggaccgagacggaagctgggcaggaccactccctgcggtgcctgcggtggtggcttggacccgcgacgctcacaggccaccgtacttttctcgtgagactactggtgctactgttttaagaactacaactcccaggaatcccgggacgtttcctgtctgggggtggggcttagcggttgacccccctgagcgttagcgtgtggtgggtcacgcgtgtcgggacgcaggacgcatgggaggccaaggcagaggcactagcagccggggcaccccagctgctcgcctaggtgcttagcgagcgacggagccgtttcctggggagttctgtttctgtttgtttttgccttgtgtgatttttgagagaccttacattcagtggagtgttgcttctgtatattttctgcagtagttaaattgtggaaacgtcccgggaatgccgagttggagaattatgaggagagttgagttccaggggatccgttgctgtcttctgacctcagtagacaccaggcatgcatgtggttcacagacatcacatacaaaacaccaaacacataaaaaataaatgaagacatggaaagaatttaatgccgagtcttattcccgccttcttcccaaggcctgtgggtcgttgcaggagggagcggaacaactagaggcagaggtggtggctggctgtagggaaactgttttccagacacagtggggcagttgttcacacagactcagcatgcacaagacctgctcaaaatcaggccagacaaaattctagcatgggccgggcattggtggcgcagcctttaatcccagcactcgggaggcagaggcaggatgatctctgtgagttcaagaccagcctggtctacagagcaagttccaggataggctccaaagccacagagagaacctgtctcggaaacaaaacaagaattgtagcatggacgggagaagatgacatgaccgtctcacccccgaggagccgttggcagctgatggctgttgcaagatcgaaaagtgggttttcttcagggatgcatccctcatactccacatggccctacccttgtaagtggacctggagggtttaaaagaaaaaggcacatgaaatctgaagggaatagtggaggaattggagaaggtgaaggggatgggtttgattaatacattatatgcacatatgacattctcaattttttaaaaaaagttcttgaacttgaacttgttactgggcttggttgtgacagcacaggaatagacacgaatgaaaccagttcatctagcctttccttgaaacgaagtattttggatactcgtcaaaacctgaagacccaagcagtgtctgttgccctgggattgccaggctgatctggagcagaaggaaggcactgagtggaacaggaatgaatcagtgtccccctgtggaccacatcggtagtggagtcacctttcagatccgacagcagcacagaaccacactgacaactctatgacttgaattggggccagggatgcagacaagtttgtagaccgcttgcctgtcacgcacagagttctggttttgatccccaatgccacatgagctgggtatggaagtatatgcctgcagtccaagcattcccgagatggaaacaggaggatccagtgttcaaagttacatagggagttcaaggccagccagggatatatgagatcctatctaaaaaataaaaattattctagagttatcaaaatgtagcaaaaagaaaagttgtactcagaatctgaattttgagccatagcggagaacttagaattaccagcaaagtagctttcaagtttgtgagcaggagaggtgccaggccaagcaaggtgtgacaggaaatctgtgcatgatggaaaggaccagtcgactttgccccaagtgtatgaagccttccttggttgtagagagcagggccaggagggggacacagcatttacagtttactaaccagttcagatcatcttctcagatagtgtggctccatctctagattccaggggattctaactgcactggcagtcatgatctgttcactcactcaattagccctactctcaagaaacaaaatgttactgatacagttgaagcacttggcttccccaggaacaagcccattctgcagcttcaattattgccctagtgctatcccctctggagtatatcatcaatgcaaacattttaaacaatgtattgtgagcttacacattttaaagctataaaaatgataccacaccctgtatctttccaccacttactttgcattctccacgccactctagattttaagatttaaccacactagagccagggatgtaggccagtagtagcatacttggctagaatgctcaaggtggtcccgggctcaacccccagcccttcaaaagacaacataaaataaggggctggagagatggctcggcagttaagaatgttctttgttctcacagaggacctgagtccagtgctcagcatccatatcaggcagctcataactgtaattccagctccaggagatccatgcatatggcttccaagggcactcacagcatatagtttgtcactaaccacacagatatacagacatataactaaagataataacgtttaagctgggtggtggcggcacatgcctttaatcccagccctgtctcaaaaagccaaaaataaagtttttttcctatggcttattttcagcatataacattccaaacacaaattattcatcttttattttgttcttatgcatttgtgcttcctagcttttgtttttgctgttgtcatcaatgcttttagaaatattgttcatatttttcgtgtttctttgtccattcctgagggtgcagttaccaaggatatgggatacaaatttattcctgatgcactgtcaacttgctctccccattgattgttcatgtactaggagagtatgtaaattcccgttgctccatatagtgatttcattttgttttgttttgttttttgagacagggtttctctgtagttttggaagctgtcctggcactcactccggagaccaggctggtcttgaactcagagattgtctgcctctgcctcccgagtgctgggattaaaggtgtgcgccaccaaagctcggcatagtgatttcatttctatctctgacagaatttacttccttcctctttcctttcaacctttcttccctttgttgagataagggattgctcttcagctcagaactcattatgtagcctaggttggccttgaatttgcttatctttattttgcctccatcttcctaatgccaggattagtttgtacctccatacctagctcctaactctctctctctgtatatatatatatatatatatatatatatatatatatatatatattgtgggatgccctcctgtattttacaaatatgtgttgcttttattggttgatgaatgaagctgttccagccaatggctaagaagagtaataaagccaggcaaagagacagagaaagagaaggcggggttggggatgccatgtagccaccagggaggcaagataccagggcattaccggtaagccaagtggttatcttataagcagctggggacctggtgggcagagagaaactggtccatggggaccaggtggaatgcataaagcctccaactacacacacacacacacacacacacacacacacacacacacacacacacgcagagtctaggctgggcatggtgatgcatgtctttgatcccatacctcgagaggtagaagtagacagatctctgtgaatccaaagccagcctggtctacagagcgagaccgtgtctcaaaaaaagggtgggggggtattgtacatatgacattatatttattctggtcaccactctgggcttttatgcaaagactaatttctttttcagtatgggaatactggcttctacgtgctctcctgcctgtgcccttccaatggcccacctgtactcagcagtctagatgctcttcagccagttcttcctcttctttggctttggtttttgttaaaggagatgctgtacatcactatcctctgagccaaactcccaccaccttagttagttcccctgtgccctgcttgtaaagatctctatagctgggcttgtgagtgcggacttcctcacacaagatgtggggagagtgtgagagctggcctaagcatctagctactcctccaaacagttgtgtgcaattctgcaacagggtgaggttagagtgtgtagaccagagagactagggaggagccgcgtctttgtggccatccactggaaagctttcgcccatgctgagtgactactttgcagtacagctgctcctgggtatctcatgctgtaagaaaatactctcaatgaactcattggttccctggttgggaggggagattttggtagaaccaaaatgaagtttatcattgggaccttaggaggggagtcagactttgcccagaccttcacccttggagaaaactcctaagaaggaagacttccttacctgaacatgacctcacctgaggtttgagaatgggctgaatgtgctgaccgtctaattatgtggttgttttccctggctatgtaggttccccatctccaagctcccagacataaattatgctgacaccacaggaaaaaaaaaagatatttagcatataagagagtctacgtttcagcacctgtgtgccaaagaaagatactaaaaatgtgcttaactttcgtattataactcattctgtgtgctagaaaacaagtacaaggaccaaatacatatgcttcttgttctaagtcacacagtgaatgaagagactttgagggtcagattttaatctgggtgtgtttgcacacacacctgcaattccagccactggcaggcggcagtaggacaatcaagatttcaatgtcattttcagctacatggtgagtttgaagtcatagtggcacatacttagaggcaggaggattgcaaatttaggccagcctgggatttgtaggcagttgaggataatctggcactatagagagaccctgcctctgacaggactgggaagttccggggccagactgtaaggttctgtgtgtgtgtgtgtgtgtgtgtgtgtgtgtgtgtgtgtgtgtgtgtgtgtctacatcatcatgacaacctgggctatttttactggagatgttaggctgtctgcaaatatttctcaggatttggaggtggaaaatgaggtgcagaatatgtgtcattgagtaaggtgagttgagcaacaccttaaattctttttttatacttatcttttagcttttccttgcatcaccaaaatctttttttataagaataaaaagacaaaagtaattttatacctgtaattacatatgaatgctataaacatatatgtatgattctgtaactgaaatgtggcagattttcacttaaagaacaggataaatttgcattaatcaataattcaaaatagattattgcataatatcacaatacccattttttcaacacccgtttttccacgtttatttattttacttacaaagttttaatttgcagatccatatacttatttatcttgtatttggtacacagatccagctgcagtaattaggttagaataattaacatatccatcacatagaatatttatttctttgttgaagaacatttaagacatttttctctagatattctgaaatatccgaggaattattactaactatagctaccctattgttctgtagaatgttagaacttatgcttcttttcttaagacggcacccattcttgagatgctaaaatatgaataccttacaaccctttatgtattgaaaccatgttacttttgttatcattgaaaccaaaaccatgttacttttgttatcattgaaaccatgttacatttgttatcattgaaacatgttacttttgttatcattgaaagcatgttacttttgttatcattgaaaccatgttacttttgttatcattgaaaccatgttactttttgttcttttttaagatttatttatttattttatttgcattggtgttttgcctgcatgtatgtctgagtgagggctgaaggatccctggaactggagttacagacagtggtgagctgtcataaggctgttgggagttgaacccaggtcttctataagaacatccagtgctcttaaccactgagccatctcttcagctcccccatattactttttatgtataacttgtgtttttatttcttctgcggtgttttctaaagggtctctaggaagctgtttttattttaagattatttaaaatttttgattcacctgtgagcttgtgcttgcatgtatgtatgtgtatcctgtgtgtcttgcgcctgcagaggtcagaaaaggatgccagattgattggaaatggagtttagtatgatcatgcgtcactgtgtgggtgccaagaaccaaacctgggtcttctgtaagaccaaaaagtgttcttaaccaatggactgtcttatctgtctgtctgtctgtctatctatctatctatctatctatcttctgtccatccacccatgtgtgtaccagggtaccacagcccatgtgggaatcagagggcagcttctcttcttttgccttgttgatttggaggattaaactaaggtagtcaggcttggcagcaaatgacttgcctgctgagacatctctccatccctaattaacattttaaaaaattacatttatttgtgtgtgcacgtgggaatgacacagcctgtgtgtggtgcagaggataacgtgcaggagtctgttctctatcagtttggtccctgggattcaactgaggtaatcaggcttgctggcaagtgcctttatgctaggagccatctcccttgccctgtgaattagtttcgattttagccttggttaatttagacatggtttctgttgtttatgctggtttaaaacctttctctagtaagagcatcatctctattttcttgtagacattgtttttttttttttttatcacacgtgtgtattttaacccacccctttatgggggtcatactttattttttgttttgtttttagctttactttatttattgttggttattttattacttacttattttagacagggtcttagtatgtggccctggcttggaactcaagagacacatccatctctgggattaaaagtattcaccatcatacccagctgtggtgagtatggtctccacaggctttcgtatttgaatacttggtccccaattgttggagctgtttgagaaggcttatggggtatgaccttgttggagggaggaggtatgtcactggggttgggttttgaggtttcagaagcccatgcctttcccagtcagctgtctccctgccttgtgcgtgtagaccgggatgtgagctcagttaccgctttagtgccatgcctgcctgctgctgtagttctgccatgttattcatggcctctaaccctctgtgtagatgggcttttctttgggcctccagctcacaaataatgacatggagacttattaattattaaagcttagccttagcttaggcttgtccctctagttcttataacttaaattgacccatttatttttgtgtctcagttacctctgatctgtgccatacgtccaacagatgtctctcaagcagctacattcatctcctatgtcttctctctctgcctgttagttctgcctattacctcctgcctagctattggccattcggcttttaattacaccaatcacagcaatacattttcacacagtgtacaattaaatatcccacaacactctaaaactgtgagccctaataaactctttctcctatgaagttaccttgctcatggtgtctcttcactgcaatgaagtgactgagacactcacttagaacataacacttctgtggggtgggggacttctgtattgttgttgttgttgttattattattattattattattattttgagacaggctttccctgtgtagcccttgctgtcctggaacttgctctgtagatgaggctggcctcaaactcacaaacccacctacccctgcctccctagtgctgttggcagccagcacctttacctactgagccatcttgtcatgaacacattttgtcccacataagatatatgccattgaagttactcagtttttgtcttgaacatcctcagtaattagcttgaatttttttttgttttttttgttttttagagacagggtttctttgtattgctttgctttggaggttttctctgcagaccaggctgtcataataaaaattattaacacaggtttttaaaccttagatatagttgaagacttgactattcttttagtttcagtgtttttgcttcacacactttaaaggcttgttattaggtgcaaatacatttagaattagtctgtcttcttaatgggttggactctatcagtaaacttggtccttctttattcctgatgtttttcttgggctgtcaggggcagagtctatgcttagcaagcagaaatgcctgcctttgagccctagcattgcctaaaataacaaaaccatcccaagggtggaacatgaaggacaacaaaaccattcttacaaagactattcagcggtgttttcaatgtgtatcttctttttcttaaaaaagacttatttttatatgtacgtgttttgcctgcatggatgtcttagtgcccaaggatgtccaaagacggcctcagattggctggaactggagttacatgcagatgatagtgagccaccatgtgggtgctggaaaccaaacctaggtcctctctaggggcagtgagtgctctgaacagctgacccacctcctcagttctggagtttctttctctgctcttctactttactagcagcctttggtaaatcaaacagacttggagacactggtgaagaaagtttctaagactgctttccaatagctggatcatgtaatgacacagagacgaagactagttggggaaacaggaacgggggggcaaaggaaaagctcagacttgatctgccatgttttcagtgtcaattggatgtaggcagagatctgaatggagacacagatttgtgagtccaccagagttgacaaaagaccagaggtaaaatactgaggagcaaaccattaaaggctcttggaaggagacatcatcaaaaattttgaaattttggaggtgctggggatctagtagaaaaggggagcgggtggcgggggagacaatgggaactcacatgctaggtaagagctatggaaataaatgtgtaacgctgaaagtcctgggtatgaagggatttactcgaaagtttacttggagtgttttccaagtcaatgtagtactgaagctacactgagcagaagaaaggaaaagacggacgataaacaacatccacgcggttgattggaagaagggtgaaaggcaagaggatcctctctgctccttctttccagttagctgccatctgtctttctgtgtcagccagtctcctttgaacagaaggccttagctgaccattctggattcataagctatgtatgagtccatgctaggtatctgttatgatatttatcccggtatattttgtaacatacgacatgctatgtagagagagaggggcgatctttgtaattccaacgcttaattagcataacatctggcacaccgtaggcggtgaattcagttaatgaataagtgaccggcagttttagggaggtataggtttgagctggagggataactcagcagttaagaacacttggtgctcttgcaggggacctgggtttgcttccagaactcacatggtggttcacagccatccttaacttcagttccaggggatctgatctctgtgggtaccaggtatgcatgtggtgaacatacatgcaagcaggtaaaacattcacacacataagaggaataaacttaaaaaaaaaaagactatataggccggtagaggctggtagagagactaaacatgcagagtagagatattactgaaaaatgtttttccttctgtcagagagagtgagattcagcccccaagtggagcaagactgtcaggctggagatgtgagaagacgaaggaattagtgctaaagtcacccccccccattttttctgtaaagaagatttttatttttatgtgtataggtgtcttgcctgcacttaggtatgtacactgcctgtgtactggaaccggaagttacaggcagtcatgagctgccacttggatgctgggaatcaacctcactcagtcctctggaaaagcaaacatggctcttaaccactgaacttcctgtctagtgctgcctctcacctctctctggatgtgtgtgtctctctcttctcctctctttccctttctttttcttctaattgcgtgttgtaggggttagagccagggaagaaagagatacagaactgagaaggacaaagcattgcaatgagtattttgcggaatgacggctctgatcaggaaaaagttttaaaaaaaaaaattgccaggcaggggatggcaatcacttgaagctggatactctttgtagtgactttgagagtgtccctccgtgctcccccacccccagtgtgagtttaagaatctaggagagttaaaaacaaacacaaaacaaaaccccaatcaaacaaaagttttagctgggtggtgacagcacacgcctttaatcccagcactcgggaggcagaggcagggggctctctgagttcaagtccagcctgatctacagagcaaattccaggacaaccagggctacacagagaaaccctgtctcgaaacacgcacacacacaaaaaccagaaacaaaacaaagaaaaaaaacccaaaagacaaaatttttttttgagagtcttgctaggtatagcggactatccgggctcctgcggccgagtgagttctgtctgttttgagacaggctctccccacaactcactatttcacaccaggcgtcgtcctgggagtgtgggtcgcaggggtgagcctgcgtgtggcgggggcgactgtcagagcggaggcgtggctgcgggtaccctaaggacgccagcagggaaggagagcagacgcttctgctcccgtcacctgggatgctgcgggaggcccaggccgctcgcacgctcgcacgctcgcacggcacaccgaccgggaccggctcccgctcgtggggcagccgaggccaccgctccgagagaatccagcccgcgcctctgctttcccgaacgctgacggggccatccggaagtgtgggcggtgatccggaagcagatcctcgcgacagtccccaggagccaccgccccctcgtcgcggtgtggtgcggtgtgctgcttggggtccgctgtggctggggcgtcccgatgctccccagctggcggagtcaggggcggagggaggatgacctctccttggggtcacagtgccgacctggcccgcttctacactgtcaccgagccccagcgacaccccaggggctacacggtctataaggttactgcccgggtgagtgcctggatagggacaccggggcggggcacgggctccggactgcggctgggtgcggctagtggtaggtaggacccgcggggatggcgactcgggagacccgcgggagtagacaggaacgacaggcaggaggcagggaccccaggatggaggtgctggggaccccaggcagaggacagggaccccagaatggagatgctggggactccaggcaggaggcagggaccccaggatggaggtgctgggaaccccaggccagaggcagggaccccaggatggagatgctggggaccccaggcaggaggcagggactccaggatggagatgatggagacaccaggcaggaggcagggactccaggatggagatgatggagacaccaggcaggaggtagggactccaggttgaagatgttgggaaccccaggcaggggacagggaccccagaatggaggtgctgggaaccccaggccaaatgcagggaccccaggcaggagaatggactccaagtagatgggtggtgactagctattgggatggcacgctccactagccattctggggtagaataccggtggatgactttaaatggatgacctagtctccgtcccatttggactttctcttagaatgaaatttgcagaagtgggctggcttgttccagagggaaagcacacacttaaaaaaaacgttagtgggtatgttgtctggcttacgaaactgaagagctgtctccttttaacttctcattcagtgacaggtttggtgtgaggctggtaggctgttggcaaaggattcactattaggttacccgtctcggacctccagcatttgtttctgagttttcctgagccttttcggaaggagatacatacatacttaattgatcttacctgaggtgacttgagggcaggctgggctggcaagatggttcagcagttagaggtgtctcagagcaggctgtcaagcctgaagacccgtgttcaagtcctgagacctacgtggtggaaggagagaactgactcccgcagattgtcctctgactgacaaaggtgtacctcccaccacaaataaataaatgttaaatttttttccgaggctatttacatcagttcagtgttccaaagttagcaccattttttcttaaattttattgctcagcttgagttttgaaaactactcatttcccttagaggaatgtaagagtaataacacgaaatgcgtgcttatgtgtgcggtgcttgtgtgtgtgctaggcattttgcacccatcccccagtttaatttttcaacttcaggatgaggaaacagattcaaggaagtttagaagtttgctaaagttactgttgcaaagcagaggtagctccttcagtctttggaaccagttctgcctgactccaagatgaatatagtgtcaggaatgaaaagttgctagtattaatttttgaagaagacaggtatggatgaaggagtaataacagtacagtatccatttagaatgtatgcaggaagctggccctgagaaacccgagagactagattggggtaggctgaacttggaacatgcaagtggctgttggcatttggaaatagtgcagagtcagacagatgtaagctgctgggttgggtaagtctgtttaagatagcaagaagaaaaaaaagatagcgagaagaagctaggtggtggtggcacacgcctttgatcccagcactcgggaggcagaggcagtcggaggagttcgagaccagcctggtctccagagcgagttccaggacagcctccaaagccacagagaaaccctgtttcaccccccccccccaaaaaaaaaaaatcccagaacttggcagggcagggcagaggcaggtgtatctctctgtgagtttgaggccagccttgtctacaaagtgagttctaggacaggttcaaccctgcttgaaaaaccaagaaaaaaaaagggaggtggaggcaacaagaagacgaccaactttgtaaagattagggaaaaatttgcttttcctttttgaggtcagatttttgtttgggtggggtgtgagttacagtttttgtctaagaactataacgagatgagaggattcttcgtataacattcttgaagcctttttagtcattgagatgtttggtttcctgatacgcagcttatagaatcagagctattcaacagacaagaggcgcctatcacaccagcatgctgaaactccacggctaacaccagcattgcatccgtctgggcctttccctcttactagacggagggtaggtgtcacgcactggtcattgcaaggccctcaggctgtttgagttttcctcttctctttcctttttatgacttatgcattttcattttatgtgtatgagtgtttttttgcctgcacgtacatgagtgtactacatacatgtgtgcttggtgcaggcagagtcccctggaactggagctacagaccatagtgagccaccgtgtgggtgctgggacccgaacctggttcctctgcaccagcagcgggtggcctttaccaccgagtcactgctccagttgagaacattttcccctgtactctaggcaccttaagtagtgggtgtgaagttccaggttctcggcactctaaggcatgcaaggaagtgtgggggcctccctttctactatgtagattggagtctattgtgcttaaatagagacagtagtatagaaactgtgtagcgccacagacaccacagaaaacagcgctgggaattcagaagacagagtgctgtggctccagtggagcaagatgggaggagccaaggaaggagagagagaggttggaggtggaagaaagtgatggagcctataaatgcctgggagtgtgactgccctgtggagcttaactggaagccccgagtatgataattgtattattacatggtggctcacgaccatctgtaaggagatctggcacccctcctggtgcgccaggcagacctcaaacatcctggtataaattagatggtgtggcacatggactcggatgtacccatgtgtatgtgctgtgcacgatgcctgtttctgtggtcactgagcttgaagattgctgacactgtcttctctctgtaagtgtcctcatctattgcctgtgttacagactgtggtttttacaatgttagtgggtttgttttttttttgtggttgtggggatcaaacttggggtctcacagaagtgagagtctgtgccactgagttgtgcccacagcctgaggtttttgttttgttttgtttttacagtatttatttgcctgtgtgcatgtgtctgtgtgagtgtgggccaccgttgggaccggcttgtcttccgtcaccatgtgggctctggagactgaacccggcttcttccctgaaccatctcagtggccccacagcctgagttttacatgctttcagataccgttttttttttttttttttttttttttttttttttttaaattcaggatcaacatgaaggtgcatttaaaaaacaattatgcctaatgttataaatcaagtaaaatgtttactgctttttgaaacttaagaagaaaaacatctttcctcaggaaactaaatgatgctcccctgagagctccccacaataaaaactagcagagctttctgcgtgtttcctgctcctgactgagctttgaggaatagttccagcatttgtgatggtcaggagtagagttagaatcattacattgtggaccaaagggactctttcatcttaaatctccttagtactttttctttctgtttttaattttctggaacctggcaggcttgcaataacttcgtggttatatagaggccaaccaatagattccctattagttctttttagtttttgcttgtagaggaaccagaagtattttactagaatgtaagaatcatagaagcttccagagcagtcagacacagtggtaagaagcttttttgatctgaggttaggcttacatagaattacatatgaaggaccagttagctggttcagagcagtgcccactgtgtggttgtttccttagttggctctgagcagtgcccactgtgtggttgtttccttagttggctctgagcagtgcccactgtgtggttgtttccttagttggctctgagcagtgcccactgtgtggttgtttccttagttggctctgagcagtgcccactgtgtggttgtttccttagttggctctgagcagtgcccactgtgtggttgtttccttagttggctctgagcagtgcccactgtgtggttgtttccttaggtggttctgaaaagtgcccactgtgtggttgcttccttagttggctctgagcagtgccctctgtgtggttggatccttagctggtactggcagtgcccactgtgtggttgcagtaatgttatctgtttgcctattgatggatgtctgggttccttcagttttgagtgcagcttttgtgaatactcatgtgtacgttgttggcatgtatggctttctttctcttgcaaccacatagtttttaaaattaattaattattattattactatatcatgtactaaatcttgaaatcaggtcatgtcagacctctttctttcaaaatttgtatagtggttatttagattgcttgcatttttatataaaattgaaaagcagcttgtcaaattattcaaaaatgcctacttgcattttttgatgtaggattacattgagaatgagtatcaattttagaaagaattgatgagttaaaaataacaaacgtcttctggagcatgtccctgtaaacacgctcttcagtttgggcattgctttgagcttttcagtttctctctctctctctctctctctctctctctctctctctctctctgggggaggggagtgtggggggtggtttcaagacagggtttcactgtatagccctggctgtcctggaacttgctgtgtagaccagactggcctcgaactcacagcgatctgcctgtctctgcctcccgagtgctgggaataaaggtctgagccaccactgcccagtgaggttttcagccttgcacataatttggaacttgaagctgagcctatgtctatcctcatttcatgtgactaatattattgactgatgacagtaggtacatagatgcagcttactgtgaattaagcatttgatataaacaaaacccaccaagtttccctctgttacttctcatttctggtgggggagttgaagctcagaaggttcttccccaggaccactagtggtcagggagtgggtttgctttgctcacttttggctggcgatggacgcgccctgcactgtgctgctgaatgtccccaaaaaacatctcattagatcctgtcccacgtggccttcttgcctgtaagtgatgagctcgtaagcgttggaaaactcatggctctcagatttgtctgttttgtccagagtcattttattctacctttcctttctgactattaatactgtttaacctaaaactctcatatgccttaattttagtatatgggtctattgaaatttgtttattgacatctcagatactcaggtttgttttaaattgcaaatcttctttatcagaattttgcttttcttctttcttccttccctcccccctccctccttccctccctccctccctctctctctctctctctctctctctctctctctctctctctttctttctttcttgtatgtttgtgtgaggggcttggatctcctcttgaacctggattccccggaagagcagtcagtgctcttaacctctgagccacacttcagctcccgaattttgattttctttgaaccttggctgggaaatagtttgctgtagtttggtgctgtaactagtaaagtttgataggagtaaaacaacttgggcaaacatttaaatatccacggtttgattgattgttgccaggctcttgagatttttttttttatgcagaaaactgctattgctgtcttttgttacatttatttatttgtgtgtgttagcatggaggtcagaaggcagcttgcaagagttggttctctccttccatgtgagtcccaggatttgaacttaggttgtcaagtttggcaatatagctttaactactgaaccatctcaccatcctccaattcctgtctttgccaatttgtattcagcaggttttgtaacaagacactattggctgagtgacttaagcaatgagacatttagttctggacgctggttagccatggtcagggtacagcctgtggaaagcctgattcttagtttgccgatgtctgccttcttcttgtatgtcatgacctcggggtcatttatattcttgtgaggatactagcccctgattacttcccaaaggccttatatccagacatggcaatcagaggatgaaggcatcagcataggggtcttagggggacatagacattcagcccatagtgctttgaacctttcatgaaactcattagaaaatagaatctgtcccattgacttgtctgtcttatctgggagcgtgttggcttcagagaactagaaaatgcaaatgtctggtgatggcttgtgcaggtgctgtctctgggggccggactacctggctggcaggtgatagctggcacatgtcttcttgccagtctgtgacacctgcgtctttgcagggaggccagggagtgaggggctgaaatgcaggtgctacggtgaattggaggttggatttggtaagaagacaattaaatatatgagtgaacgttttgccatgcttaatcatcctgccagagttatggttttgtgtgtgcgagatgctatttaaagatggcaatatatccacatgaaattatgggtatgtttcctgaaagtcaatgtctgaaagccaaggtagcatgtgctgtagtgatgaatgtaattttagtgtactgggtcaccacagggagtcacttcagtgtcacacagcctttttttgtgtagcctgtaatcccttctccactcttagagactgtgtctgtgaaaagtagaaaggcatggccctctctgtcatattttattatctttgttttgcagttcatgttgtatttaaacatagccctttgttactttaccttcttagctgagtcctcatgatggaggacttgggtacaacggttgctcagtgcccatccaagttagctctatgggccctgttcctgtggagcctgctgtgcagtgactgcaaacagtgacttaaacagcagtgatattgcttgtctgggttgttgaagggaccttgggatcagcccctttcaagggacatctgtttttcacgtggagctcttcctggtctaggtatgaggcaattttgtggaggggcgcctccgaaaagttccggggttcacattggctaaatcactgtgtccacctgcatcgagctggatgacctcagagaagtggtttaatactgatgccttggagagctcaggccatgcattcccatgtctcagatggccgtgggaaaatacacatcccagccttggtcctgaggatgggtgatgggccctctgctgtagaggtcttgcactgtgttgcctctcctttagtcttacacacacacacacacacacacacacacacacacacacgcacacgcacacgcacacgcacacgggcacacgggcacacgggcacgggcacacgggccacagggcacacgggcacacgggcacacgggcacacgggcacacgggcacacgggcaggggtggcttcttaaaaccgatgttgagcatccttctgtgactggtttctgatggtttaggaaattcaagagttgaataatttttttagttttattttctagtagctgcttattcaataaaagggaactcctttacatatgtctgaaagggcgatttcaaatgttagggtgataactagttgaaacagcgtgtatgcttatgtgcacgtttgctgtgtgtgttcgtgtggcggtcagggtttgccttatctctgctcctcaggtatgctgggtgtgtcagctgtctctcttcttgttgaggcaaaagagccaacaggagcaacctaggggaagcaagctttccgtggttctctgtggtggaggagccgtggcagggctgctctgtggcggtgtaagcatgaggtagatagagttcctttgcaactttgtagacaggaaccaactagcccaggaccaggtgaaggcatagccttgaaagacgggatcctgctgcccggcgtccaccagcttgcttcagttcctaaggttccacagccttctagaaccacaccacaccaccgcctggggactcagtgctcagcaggaggaattcatgggggcacttcacacccaagccaagctccaaccaccaagctatgcattcagtccctaaaagttcttgtgacttgaccaagaagtaggtaagatgggttagcactctgattttgtgggctctgggtgtggtgatctgttgaccattgtgacccaaggtcggccatattgcagaggatggccattgactcaggataagcatggacatgaaacagaaaagaaagatagggacgttgtggagatacggaaaggggaaagacctacttacacatgagtctgatcaaagtccctggcgaagaagccagaatcccagcacagctgacagtatagagctaagttccacacaagcctagatgtgtataaccctgggcggagcctcattccttgacctagactttgcccaagaatctcaaatgcagccttatcttagttaacagtagagatagcctacccttttgtgttttggcaaccctgtaaagatagtaacttcaaaccccatcaaaatccctggatgacagtagcaaaaaacagggagctgtgagtctccttgaggggccatcccctcactttcggtgactctctgagaagcccacatgatgctgctgggtgtgtctgtctgtctgtcctttggagtgtttctcttcctcttaaccattgtgcttgaagtctatattaaaatatctccattaaactccatctctgcctcataaactgactagttctgagctctttgtgtgtcagagccacacatcctggttgcctgggttaaggtccttggaagcctaggagagttcctcagacagctaggtgatggatgatggggacttgtgctccagtttctgtcctcatagacactggcaagtgtcttggtgggctcaggctaattttaggtggccctttcaaccctatcctaccctcagctctaaccagtttatggcaaggactggagccactgttcaacccctttgtttttagttgagagttccttcccgctcctcttcccgctccatctttctgctcatctccttgctctgtcctcctgttctgtctttctgctccatctccctgctgtgctaaagtacatctcctttctggttggctttttttctttgggaatgaaaatttggggtgcctggactactgcgttgcggtttaggaaggtgtggccctgccctgctctgtcctgggggactgacctctcggctttgttgagcacatccaggtgccactgttgtgactgaagcaaaggatttcattttctgtgcaacagaggtggctaacctcactgtagcctttgctttcttcaactcagagttgactgttggaatgaactgaggcatcgatcggactacgaaccctggcagcgtgccaccatgttccaaatttcgtgtgttatattagcaatggtgatcaaaatgaaccggcaaccttaaagtaaaagttgaattgtcaggcgctggagagatggcccagcagttcagagcactggctgttcttccagtgggcccggttcaattgagggcacccacatggcagctcataactgcctgtaactccagtttcaggggttctgacaccttcacacagacgtacatgaaggcaaaacatgaatacacatgaaataaaaatgaataaataattttttaaaaaagttgagctgtcaggcgactctgggagacaccacacagtatgtctccctttagagatgcacagttcggttaaggagtctccctcccttacagaaagggaagtggaaactctaggttcttcctttgagttgatcttagtgagcactgctgctccagatggggctggaggtgcaacactgtaagagaatgtgtttcaggatgatttgttgacaaaatgcttagcaccaagagactctttgatagaatgtgtggagtgaccctgatcacagtaaccgatgctgtgatggacactgtgacctttaataaaggagtcaccgattcgtctctcgggtttgttggaacttggtggctgaaccttatgactggaaatgccactaagcacttagcaatctagtgaatgtgaagtggttgtgttttaggctattacttgtaattgctaacatatgcttaattttatccctttaattttattaaagtatggttaaatattttgctcatatttgcaataaagtctttccatcatctttccagtgaccgatgataacacagagagctttgctggtagggagtgagatggctcagtgggtggagggcgcttgccactggatggtgtcagcacgacagcctgagctccacctccagaacccatacaaaagtggaaggagagaactgaccacagttgtcttttgatctgtcacatacacatgcatgaaagataataataaaattaaaaaatgttgttagcagtagtcatttggactcaattcatgttatcttagccattgtgtttgtttctttctccttttaaagaattttattatttgtgtgtaagtgtgtgtatctgtgtgagtgtatgtcacatgtgcgagtgtccttggaggccagaagagggtgtcactcctggagctggggttctaagtggttgtaaatcacttgatgtgggcactgggaactgtatggttgggtcccatccaagagaagcacgtgctcttaaccgctgaggctctctccagctccagggtacaggagggtaatgcaggtatggagccccttactgggatggcagtgattgaacttggccattttatgcagcacataggagatagaccgaatgtgctccctgtccccagtgtgtgcagcacagtaggtgctaggatgtgatgggagggcaaatgtaacagaaaccctgagggtggtagggctttgtggaaaggagagagcataattattgctcatctatcaaagttctaactccatatctgaaggtgactaacatgaacttatttgtttgtctgtgtttgcaaagagcctcacttaaaggtttcggaaggaatgaaataaatcgttagtacaaaacgcctggaacttgacatcatgtagactaagctagccctgaactcacagagaccttcctgcccctgccaccgcctcctgaatgtgccaccatgcctggtgtaataaattgatcttaatttccagttattgatatgttgtcattgatattaaaaaccttttctttctcctactctcctattcataagcaaccttttgttttggttcttttcagacagggtttctcttcataacagttctagctgtcctggaactccctctgtagaccaggctggcctggaactcacagagatccatgtgcttctgcctcccgagtgctgtgattaaaggccatgtgccaccactgcctggccataagcaaccttttttttttctttttttttaaattgtgttattgttgtgtttgtttcttttttttaatgttttatttatttattatgtatacaacattctgcttctgtgtatatctgcacaccagaaaaggtaccagatctcataatggatggtcgtgagccacccatgttgttgctgggaattgaactcaggacctctggaagagcagtcggcactcttaacctctgagccatctctccagccctatatgcaaccattttaatgtgcttgtgtgtttttaatcctcataatacaccactgtagccctaaattcacttacatagttagatgatctataatctaaattattacgagagttcccctttaatgctatttctttttactttctgaagttttgttagtatttcaggccttttgacctttgtaatcagagaagcctaaaagaatcggctgtctttctctttgctcagtgtataaatgtgcttttctgttgttgtggagtgaacctagggcctccatttatgaagcagacactgatgctatatccggtccccatcatggaatattaaaagaagggttacccttgcatttaaatttttgttaattttgttttaatttgcttatttttgtatctaaatttaagttgttgtgaattttgtttccttcttcaccattagctgggtcatcccttacagatatcgaatgtgtttgaatgctgtggtgttttttttttttttttaacactgaaatgctattgtgctaactggattcttacacaattgtaatacacagaagctgaggtggtagctcactggcggtgcttgcctgtttgcacgggctgatttcagtcctctgaccgaaaagggaaatgtggagagttgagtgtacatgtgccaagcacagctgttcttcaggcttggattcgtctgggcctgagaggtgatagataggcagactgttagcacgacagcgtgcagcgaccgaggccgggaacgttgccgagtgaggtcacctcactgacttgagtttttagtaagtgacatagcattcattctcttccacagatggaattttaggcaagtgctattgaaagtcattgcagagctgtgaaatctcatttgataacgagctatttctgtctgtttggttttaggttgtctcacgaagaaatccagaagacgtccaggaggtagcatgcttatccgtgtgaaaactcctcttgtccttgttgaagaaactgccccagttacttgcatgagtgttggttttcgtgtgatggtttctctactgcccgttacccttcatcctgctgagggggcgttaggtggtgggagtgagaatttggggagctagggagctctccctctaacactcaccccactccagggcttcgctgaccttttcagagtcatgatgcttgttcattaaagcttgggtattgggtggccagtgtcagtttgaaagctcagcaatagattaggggatgtgtgtacccctactccggtgttgagttggcatgctgaagtcatgactgcttcaggtatccctccttatttttgacttttttgctgagttcttttacaggcttctcttgcgtttctctctgtcatcctctctgctgacctggcatgttttgccttgagtggtgggattctcactagtggttttctgcgctctttgcttaggttagggacgctggccaagcaggccgcttccccctcgcatgttagtttacttcctgtttgattcccatttatttttgagaccagaggcactgctaggggacccctaaccccgcccccagccaagtgtttacacagatgatgtaaatttatgtttttattctgcggcggtgtcagttgtcccccagtggggttcgagtgtctttagacggggcgtggatttgtgcttagctgcaggtgctactcctgctccaaagcacctggcttgattcgtgtgtttgagttgattgtctcacactggctggcccaagttcattagactcttggcgtgtctgactttgtagtttttgtctcatgagtcaaaaccacagtgaaagatgccttcaacagattttacagtatttccctcacaggttgggagactattggaatactaatgtttcagagagaaggagctgtgtgtatctcatggttaattgttctctccttgcatgccaattgatagcacgaagcatgctttacagttcaacttctgtttaatcactgctgcttctagtagatttggcttctgaaagcttattgctgttagacttggaaatgggttgtgtgacatctgattgccgttctttggttgtaccttgatgttccccttttccagggagaatcctgagccaacttgtccatgagcgcactctgacatttccttagtccttttttgagggaaactcttttataataccaactgctggtgacccattcatcagcaagctcttgtaagtgtccttcagttagacagttgcatgttcttatgttagaaatgataaaaaaaaattgagtcttctatgtagctgacttcctaaaccatagaataccctgagattttgacagtacctctaggctctcatttgtcatgtttaaactttggcatctcacttagaagagtttattgttcaggtttccaactcctttcctttggtgttcttgacgctgtgaactcacagctttagaatatactcaggcttccacaaagctctgggcaactaataaacacacacttagttcaagcaaactacgactatactgtccttataaagctggggaaatgtctctgtccttttgtagagcttgtctggcccctccagattggttttcttcctaagaatactaaaacaacacgcacaggaagcgaatcacttggatattatgtcagcttcccttttcaaattccctctagatttctaagaaagttgagtggttggggagacgattgcattcatggtgtgcctgctgtgcaaacaggagctcccgagttttcctggggaccgtggtttgtgcttgggatctcagtgctgggaggtggagacgggcagatccttgggtggacagtgcctgaggacagacgacacttaatgtggacctctggctcccacaggtgcatgtacagacatgcaagtaagtagcacaaaactcaatacagaggaagatgcacaagcaaataggacgacagtcatcgtatctgtcgtaagcaaagatgacccaggaagttcctagtgttcaacgggagtaaagacgaaggtgttgctaggtgatgctataaaacaggggaacaaggttttttggcaccattaagtcgaagtatctgaaaaggaaatgcatattgtatgtcgaaatgctaaaggggatgcttggacaaaaaattgagcttttaccaaatttttaatctatatatggtcatcaaatgcttcactggtaaggtttcttcagagtgcatagggagcccacccttgcttccatcgttcccgtaggaaccagccagaccttaccagagacagtgagttccctgtgtgtctgctcctgtcttagcggaagtaccaaccccagtccctactgatctgcgggaagcatattcctgttctcatttccacttgaggatttctggctcttcagatttagtgaagaggagtaagaggagaggagaaagtggctggggcactctgttctcagtgttctggtcctggagcctggcggtaaatgaagctgtggctctggtgggtttatatggctttatatgatcttgtatctcagttgtgaaagttttcctcaactaccactcctttatttgaaaatgctcctaactaggaagctttatctgcaaatgtgattgcttcataacctcgttacctgctcctcctgaagctctcggcagcatggtacaagcatagtttgggttacctatgtcactatggtccatatttatttattattttgatcttctgagatgggctcgtgctgtctaggtcagactgtcctgtaactcgctgtatagcccagactggccttggactcatcttactgtccagctttctgagtgctaggactttaggtgcgagccatcatgtccagctcagttggatgcgttttgaaatgtagaaacagcacttttgctcctgacaaaattatgcttctgtatcaagattggaagctacagagaacaagagctgtggtgggtgcagccacctgttgtctgtccctgtcctgagtccctgacttcccaggtgttggaagaggagggagatattcttgccctattgttggttctgggtggtcaacatttcttcttttccctggccctgaggaccatctcagcatagccaggcttctgttttcttcatccttgctcctgcctggtcctttggtgtccctgtcccctgttggactcttcatcccatcacagacacttagaagcctgctggtggctccggagtgagtgtgttttgcactgagatgccaaacccatgtgtcctgttgaacagctcagaagcccatgagccagatgtgcacagctggtctctgacaggcttcatacaccgcttcctgctccccacctcaggagacagtaccactgattcagtcagagaccccaagattgtagaactctccacctttgctatctttctctctttagagactttgtccacggccttgcctctgcctcccatgctttgttgctctggtgacttgtagatgccactctccaggccgggcagtatctcagcattcatcaggccctttgtgaagtcgtccaggctggcttgctgttcttgccttgcgggagccctgaaaggcggggcctgtacctcctgtctcatactttgggacaatatagtgtccagaatagggtagggacactggttttggtgaccgtttttgttgagtaaatgaataaaagtgaaacactgggcagaagcaacttgtctaactcatgtcatggttcttagagcggctgcaaacaactgtaattatgaacgccaagaaacaccctcttcaaggctacttcacataacaggaccaagtttggcaagacttgaaaatcgtgtccagtgacctccttggcctagtgtttggtcatcatcagcatgaccctgcatatacatgaacatgtaggctcttttaaaagtgaggtagtcaggcttttgggagggaggagtgtacaacttaggttttctttgtggaactcagagctgacagtgacattaagaccatgcatcaaatatttctttctttttttcttctaattcattctaaagaagatcaaatactttaagctaatgacagcaaattgcttctccatgttgtctaatctatacttttttgtgatttatgggtattaattatattctggtcaatgtttactttgtatccagaaatcttatggttaagatttatgaaaaaaaatagggaatttaaaaactcaccttttctttactcccagccatttctccttcactgttagtcttttttggggggggcggggaggagggaacacattttatgtcctttttgtttaaaatttgcccgagattgttgagagctgcagagatgtcttagaggttaaaagtaagtcctgcgcctgctgaggactgggttagttccccagcagctatatgactcaacagcaccactcatgcagggtcatatacctggataatctgaaaaaagaaaaaagattaaaaaaacaaattgccacagggtagtggtggtgcacacctttgatcccagcactcaggaggcagaggcaggtggatctctgtgagttcgagaccaacctggtttacagagtgtttcaggacagcctccaaagctatagagaaactgtctcagtccggccccaaattgcctaagttgtttgtgccttataagcatgatatttgagatagtgtttgtcatttaattcattcccaggtcagtagtaacaggattttggagagaatgtattttatgcagcatagagcattttgttggatacttttctaggatgagttaaaaggctgtaaggagtcaggacgtaagtaagagcctcaagtcagcagtgtgaggaagaagcaagcttcagagtttaaggcagatgttgggttcccttcacacaccttcagccctgtaggacagagagtgtatatgtttgctatgcatggaaatttttggaatatttaaggaaaatattatttgtggcccagagacagaattgttgtgctttgaaatatgcattcaattttgctttcttttcagataattgtatggaagagatacagtgactttaagaaactgcacaaagaactatggcaaattcacagaaacttattccgacactcagagctgtttcctccatttgctaaagggatagtgtttggtaagtgctcttctgagattaccacctcctgtccctgtccactcctgcccctgtccactcccacccccgccaccagactggcaattgaatctagagcctcatacctaccagaatctacagttcagccctaaaaattgtgatttaaatgtgatgattagctaaacgatggtctgtgctgagccctttacagtttagcaagtacttcatactgttttctcatgccctcatatagttcatataaaatatgtttcctcttctcagccatggggtaactgcatctctggccaggcagagagactaggaagctaagaaaggatttttattcaaacctgtgaccttggatggagtcttagtcagggtttctattccgtgaaacaccatgaacaagaatcgagttgggaaaaaaagggttttttggcttatgcttcagcatttctgttcatcattgaaggaagtcaggacaggaactcaaaacagggcaggatcccggaaacaggagctgatgcacaggccgtggaggggagctgcttactggcttgcttcccctggcttgctcagcctgttttcttatagaaccgaggaccacagcccagcgatggcactgcccaccatgtgctgggccctccaccattgatcactaattgagaaaatgccttacagctggatctcatggagtcatttcctcagctcaggctccttcctctgtagactctagttagtgtcaagtcgacacacaaaaccagccagtacagatgggttggctcttgccctctgagtgctttccgtgccccagccccagggtagtgtaatgttgtaacccgtctctgtggggcttcaatcagaaccagccaacttgcctggtttgtacctgagagggggagtgtggattgagaaagggcaggtaaagacgctaagatagagtcaggaggccgatccagtgactactggacacaccaagtttattcttcaccattcttaaataccccaaccaacaaggggaacgtggcaaaagacttctttatcatgtacaaggaacaaacagaatttcttcctgaattctccaagcacttggtaaccacaccttagacccgtaatctagctttgaggatcaagactaaccacacctcagacttggtctgttgtcaattaaataagatacccgaggccaagatcaaacatcctagtgtagcaggcctcagacctttgggtctcaggacttactgaggacagttttgaactctttgcccctacagtgtaaccctcctcacgcatatcaaccctgcgtgcagcagctttgagggccctgcttttcacatcttctccacctttcccgactggaaacctggctgactgactgcagagaaattgtgccacggcctggctgctgggctgtcttgagatatccaccaaatagttattatctttaaacttggcttcatttagtgtttaggatgtaggcagaatgcagcccgagtctttgccagagctgagcacaaatggcttccagctgaatccctggtagagtgctttccctttttctctcttgacctcctgacccggacttcccttctggggttttctgagcactctagtcttgtgagtcccactctaacagccaccaggcttttaggctcctctggttctcaactccatgtccgggtttgcgtggcctgtgagccctgcagcaattccatgtccgggtttgcgtggcctgtgagccctgcagcaattccatgtccgggtttgcgtggcctgtgagccctgcagcaattccatgtccgggtttgcgtggcctgtgagccctgcagcaattccatgtccgggtttgcgtggcctgtgagccctgcagcaattccatgtccgggtttgcgtggcctgtgagccctgcagcaattccatgtccgggtttgcgtggcctgtgagccctgcagcaattccatgtccgggtttgcgtggcctgtgagccctgcagcaattccatgtccgggtttgcgtggcctgtgagccctgcagcaattccatgtccgggtttgcgtggcctgtgagccctgcagcaattccatgtcctgggtttgcgtggcctgtgagccctgcagcaattccatgtccgggtttgcgtggcctgtgagccctgcagcaattccatgtccgggtttgcgtggcctgtgagccctgcagcaattccatgtccgggtttgcgtggcctgtgagccctgcagcaattccatgtccgggtttgcgtggcctgtgagccctgcagcaattccatgtccgggtttgcgtggcctgtgagccctgcagcaattccatgtccgggtttgcgtggcctgtgagccctgcagcaattccatgtccgggtttgcgtggcctgtgagccctgcagcaattccatgtcctgggtttgcgtggcctgtgagccctgcagcaattccatgtccgggtttgcgtggcctgtgagccctgcagcaattccatgtcctgggtttgcgtggcctgtgagccctgcagcaattccatgtccgggtttgcgtggcctgtgagccctgcagcaattccatgtccgggtttgcgtggcctgtgagccctgcagcaattccatgtcctgggtttgcgtggcctgtgagccctgcagcaattccatgtcctgggtttgcgtggcctgtgagccctgcagcaattccatgtcctgggtttgcgtggcctgtgagccctgcagcatacactccactgccaggtccagttttctgagtgagttactttcctcttctctgtgataaaatgcgtgatggaaacaacaggagaaaatttgttttagctcatggttcaggggacacagttgatcacggtgtctgcagtgagtgggcgcttgtatggtacaggggacacagtccatcatggtgtctgtgttagcgggagcttatagtggtgacatttccgtagtcccggtgaggaacatcagccatgaccctcagggctgtctccagtggcccatgtctgtccactaggcctatgtcttaaaggttccacagctactcatgaaagtactaccagctggagaccagtattcaaatatatgagcctatgggaacctctaacatccaaatctccaatgtgcttgtgtcatgctgtctgatatgtatcagggacggtcattgtgacctgtagcaaaggtgacggttccttgtcctgagatttggcagtagatgtctgtggcttctcccttgatgctgtttcacttccttctctctgttccctcttccctcttcctacctctctcctctcctatctgtctcctctttctgttccttctgctcccctccttttcctaaccctccctctttctcctctcttcatccccccagtcccttccttgctttgagagaagccagctttctcacaaagataccgctaacctatcacgcagccgtatgatgacaagtgggacctccagccatcacactctaatgagaagtgtgcccagactagatgaacatgcgcacattctccagtgctagcttagactttcagtgaccgtagccctagctgacagggtgggaccctgcaccagagccacccagctgtacctgccttttaggtgctgaccctcagagtctgtcagtgatggtaactgcctgacactgtcatttgtcttgtagtaataattacttaatggattttgatgtctggaagtggagttgccaccaaccaaaggtacaaatgtgaccctggttttggaattaccctgaagaggccactgatagaagtgactgattgaaccttcccacagaatagggaattcttcaggctgtgttaggactccccatctgcacgttttacagccgggactggggacagatgcagagaaccctggatgatctggcagcatcactggcattcacctgacagtgaggtgggcatctaaagcttgtcaccagtattagcaaataccctgaaatgcatcagaggagagcctgggtggccttgctgttaatgtgaactctctcccaggggctcaagcgtttcaacgcttgttcctcacctggtaatgctgtactgtggagactttggaggcggggcctggctgcaggaagtgggtccttgtagggcgggccttgaggtttagaaccctgccctgcttcctgcctattctctgttcccagactcctcctggatgagtaaattttcacgaccataccatctctgccattatggatggtgtgtgtctcttcaaaccatgagccaaataactctgcccttaagttgcttcctttaggtattttatgacggcaatgagataagtaacagatgcagagccatacctgagaggaggcactgtcctgtgccaagctgagatttagagacctgggccttaggtcagtagtgtcagacctactggttctcacaggccttcagtcactctgtctcctgagctcaggggtttagactttctgctaagtgctgatccctctcggttgtttgcatctagccctgggttcagtctccagcactgacagttaagtcttcacttgttcctttgatacctttctgtttacagtgtggtttgctttttgcccctgatgttgctgctaacctttgtggccacttgtactgccactgtgcccagcaagcatgggcaaatgccccggatctgttagtcaaagtgtcttcttttgaagcgactaggctagatgtggtgcgcacctgtaatcctagcattcaggacactgaggcaggaggatcacgagtgtaaagccaccctgagctacaaagtcaaggcttgtctcaaaaacaagaaaaaaaggaaagcaaaagtgaagtcagcagtgtgaggagcctttagcgttatctctaaaactaccccagagaacattctctataactaatctttgcttcttaataaatggtgacgtcaccgagagtacgttctgggtctgccgagtgcagggaataggtaaccacaggtagagggtaaagtgctgaatttgctggagttgtggcacatttttccctagcagtctcttcagtggatttccatagtcaccccgtcccctgtgtgcataggaagtgcccacgaatagtgggcaggcatttgggtaccagaaattctctttgtcttcttaaagatggttagggccagaaacgactgttgtttatatggagtatagccaatgctgttaccatagtagcaactaaaggagaagaaaagaaaagaaagaaaagaaaagggggacaaagggaagaagaagacagctggatttgagccagatttaagttctgtggtgtgacctgctatctgtgggtccaagtccttgaggaaacccagtcacagatgatgcttttgggaaggaggtgcatttacctgaacacattcctctttggcagaacagaactttttagagattaacccctgcagtgtagcggtaccgtagactttgaagctccatgaaggaaggaatgacggttcttggggggtcttgcgaaggctcctgttgcctcggtttgactttgtgatgtcatccttagcccctgaaaagtacttttctagggctgcagagacggctcagcagttacgaatactggctgctcttttgaggacccctggtttggttcccagcacccacaagacagctagctcactgccatctgcagctgcagttcagttctgatgccctcttctgacctcccaggcccccgggcacacatgagctgcacagacttacatcaggcaaacactcaccagaaaaaaaaaaaaaagaaaatcgtaagaaaagacaaatattttgatgcccatgttttacagatcttgcaaatggtacctggtttggttagatgatgccggcaaatgcttatatggtcagagatctctaaaaacatttggtcctgggaagctggaaagctcaaggtgtctcctggctagaattttctcaccaacaacaattctgtgggtggtcttcctggaagtgttagatttacttttcttttttgaggaaatgttgacccctacccaagtctgactaatcagtttgttctgtttcacagaattttaaagagaagagttctccaagggccaggacttagtacgtttaataactgttatggtttcattgagggtattttctaagtgaaactgccatgaaaatttttaaaaatatgagttagtagcagaaagtagtgaaaagattattagcatgtttggtgctgtggcctggcaccctgctaagagggccacacttctgctgccattgtgtatagaccattagtgcaagtgtcagcacagacagatgcagcaactgccatggtgttatcgcatggtgattggccctcaggacaccttgccacacttgggaatgagtatcatgagtattgtcttagtcagtgtggcccccaggacaccttgccacacgttgggaatgagtatcgtgtgtattgtcttagtcagtgtggcccccaggacaccttgccacacgttgggaatgagtatcgtgtatattgtcttagtcagtgtggcccccaggacaccttgccacacgttgggaatgagtatcataagtagtcttagtctgtgttctactgatgtgaagaaacaccactgaccacagcaactcttgtaaaacaaactaaaacaaaacatttaattgaggtggcttgctttcagcttcagagatttagtccattatcatcttggtgggagcattgcagattacagacagacacggtgctggagaaggagctgacggttctctgaatccactggcggcagtaagagagagaccctgggtttggcatgatcttctgaaacctcaaagcccacccccagtgacacacctccttcaacaaggtcacaactcctaatcctttcaaataaggccactccctggtgaccaagcgttcaagtctatgagcctatgggggccattctcattcaaaccaccacacaataccacagtctgaagctgttgggaatgtcctgggattagaagggtgcatgaaatgtgtgcaagtatgcatatacaagacatgtatgtgtatttagttttctctcatctaaagttaattaattagttgatttggacacagtgtcattctgtggtttttgcggcttggaacttgctatgttgattaggctggtctcagactgacagagatcttccttgttctgtctcctgagtgctgggattaagtgtgtgcagcaccatggcctgcctgagctacatttgtgagttaaagcaaacattgaccagctctgtgtttagtgagatctcatctgtagagagccgacactctagctctgtgtgaagagagcctgcccacgttgacagcttctgagagccaaggggggttgtttgatcttttgtagactgtgaattatttctgcttctattccaaaccataggtgcttatagtaatattaatccactattttttgtgtgaatgtgcatggttatacactcgtgtgcatgcatttcaccttactttttgagacagggtctctcactgaacctgggccggctgaccagccgccacccagggtgccctgtgggatttgaagttcatgatgctgtgcttggctttagtgtggtcacaggggatcagaaccaagtcctcatgcttgcgtgatgtccttgttagttcttttggttaatttgacacaagttagagtcatttaggaagaggggaccttaactgagaaaatgctactaccagactggcctgtacggttgaaggttaaggtgggtgaagcccgtggagggttgtgagttgtgtaagaaagcaggctgagcagagagagtgaggaacataccagaatacatcctcagtggtccttgtatcagctcctgctccaggtttctgccttgagtccctgccttgactttgtgtggtgatgaactgtggtgtggaattgtaagccaaataaccatttcctcaggtcacttggttgaggtgttcatcacagcagtagaactctaactctggacacatggcaagaacttcacccacctaatgagcggattaccaatacggagtcaggtgaagatattagggtatttattagggagatgccttagttatggagcaaactagccagcgagcagggaacgaagtaagtagagcaagccaagggaagaaagaagggaccccatgtgctcgcccctcactcttaaacctccctcaagtcaccctagtgggcgtggtcaggtacacctgtaggcagccccgaggaggcatggttatggtgccccctacacccacccagccatttctcctctgacttaagtattcttttaaagagagaagtattttgggcagtggttgtaagtataggctcatgatttcacctgtttgactactgaatttttctcaatattgaatattttatagagtgtttccgctcagatgtttgttgtacttattgggatgtttgacatcttatttccaggcgatgcgatgggtagggagtccagaaggacagggaagtattgctgtcttcagcagaattggttttatttgttgcatatgaagtgagaacaacggacagtcagatttagcatcctgggtcatcctcagtgtggttacatgtggtacagttttgtacaagatagaggaagctggtttcttctgcagtttggaagcctgggtacagcctgggatggaagtgccacagtgcctaaagctcctgctttgtcccctctgcctcccacatcactgtctttcctggcagcaggaagggacccagaagaggacagggagagactgtttgctgatacctctcagtggatttcagggaagcaacagcatgccttatgtccctattccgttggtcagacctcagtccccacctacagggaatgatacagtctcccggctggcgcatgtcaggggaaagtcagggacatttttgataagggggaatgtgaaaggctagacattgtggcatttagtttcagcactcaggaggcagaggcaggcagatcctctttagttctaggctagccagagcttagaaaaattttatttggttagtggcggtgacttgttctgtaggaaaccagaattccagctggcaggagccatgtggctgattgccactggcctttaccaggtcccatgctcttgatgggggtgagagcgtgtggagttctatagaactgactctgtagtctgtctgtggctctgtctttctgcttgtatttcagtgtactctgtaaggtcttctgtaagaatgttccactgtgagacaatttttacagagggtttttctgtcttcatcaatcagagacagccacagagatttgccagcatgctttgtgtgctagacactctgaaaattcagacaccgtgatgatctgtgtagtgtgcaagcttgctgtggccacaggagactcaacagtctgtgactcagtttgtctgtgggacaacttctagcaaggagtgcaggagcttgtgttttaatccaggtctggctccatatcctcttccccccagtacaaaagcttttaaaccttgcatggatatttaccacaggcaggacacacgggtgagggatctccatgtcctggtatccaggactctgtcaaattctctgcaaaaccactcagaatgttttcaggctctgaggacactgccctttcaatgtggtatttctaaaaccttacaagtcagccagtgtgatgcaggacccgtggcgtgtcaacaggtgacctgatgggaaatctcttacgggcgttcacactgtatgtatcattagagcttgtgcgagagccaccgtgccttcccatccccttgttgagtggagcatgcctgagctggacgcctcttttctcacgagcaggccaccagcagcacatacggaattcagcataaaagctttctgcttcaagctgaggttcctgaccccactgccaatacagatgtcccataattccctctcttcagcctcctctttaaataaaaaagagtagaaaagggaaaattatatgagtaattacagtattaaattactagaggaagctgtttgaagtcattaaaattctcttttcagctttagtttcaggtggccgtcttcttacagtgagtgtcttacacgggcaggacctgggtttggatacagcccatttatcagttggcagtgccatttaacttcatcaaaaacattgtatggccttgatgtgacttggaagtttgcgtgataagcactgcagatgggcagcatggcccatggtggctttgctccctgagcctatactgtcacaaaatcaaactgtcattctatccctaagtgctgcctctcgttgaattctagggcggtttgacaaaagtgttattgaagagagacgccagtgtgctgaagacctgctccagttctctgccaacattcccgccctgtacaacagcaagcagctcgaagacttcttcaaggttcgtggtcttgccccttggtgtgtaggcattcaggtggaaagccccatcttttggggttttcttatttactaggaagtagaagcttctgttgtctgtggcagagtttctgcttttggtatagaaactggaagttttcaattcataggtttttgtttttttttcaagacagggtttctttgtgtagctttggctgtcctggaactcactctttagaccaggctggccttgaactcacagagatccacctatctctgtctcccaagtgctggattaaaggcatgcaccaccaccacccggtttggtgtctctgttcttaagcacttctcccatttcctttaattagctttctagaaagagctaaatgactctgtcatgcttgtttgctcctttctttagcagaaaacacacgcttgtataccttcagcttttgggttatatgatcaccaagactcatgtgtgcagggatattgaatttccctgatgctggtggatctaggtgaaggttaatttttttgaccttatgtagttgactgaagaagggcattgcagagtcacaacctagagtcatccatggtgacaatgttgtccctggtagttttcttgcttcctttgtcattatttgggataccagtctcagactctaacctgctgcttatgcaagcccagtgtggggcttcagggtgaaagttcacgtggtgctgagactgtcttctaatgcttcccagttctccttcggagtggagttggggagggttccaccctgctgagatggggaaggctgatgcaggtcagtgatgccacgtggctcagagattggtctgggtgttaatgaaagttaggcaggctttaagcagcgtagaggacggtgtctgcccattctgtgactttgatgtggggttcctgatgtagctgctaccgactttgttttagacagcaatgagatgtgacattgacagtttgtgaagagtggacagtttctgaaaagtcaagctgatctttgtccatttcagacagtaagacttggtggcaggtgccacctctctgtcctgctctcgacttccttttgtgaaaacatagtgatttgacaccgttcctgtctaatgcaggcattcacagcaatagcttttcccctgaggatccagtctcttcgtgtatttttacttccgtttttattcacttcagtgtatttcctgacttatccgtaatttctctgtcaacccattggctatttagaattgtggtaacgtattgcgtgggaatcaagattcactagactcagtggggagaaggcacctacacaaggggcgggcgaccgcctcaggttccagctctaaggatccttcctcccaggctattccctgtgacccaaccggaagcaagaaggttatatcccagagaacatcccctgtgtacttgagggacacctattcttttgtcagatggacatttttgtgaagagttcacttgaatcttgtcaggtgttgaggagagagggtccgaattttttttggcgtttgacgtactgattatagtgttggcgcagaaactgctgacagaagacagaaaggcagtgttaaagcacaaagggttagtattttagtgaagtcattgcttaagggttatatgtctgcttgtctgtggctggagtgttcattccataaagtcccatctcttgtccctgccgtaccactctggtgactgccatctgtctgagtgtggaaaaagaagcaatagcttggagacctgaacttgtaaacttagatgcatggctaaagtagtgatcacatggagagtccgtgttagtcagttttgaaacacactgtagccccgtaactcccagcctgccttagcctctcaagtgctaggtttgtaggtatgagcaccgcaccttgctcaattatttatttatttgtttgtttatttatttatttttactatgtctgttctcagcagttaggagctcttgctgttcttgcagaggacctgggttggttcttagcacctgcattaggtgtgtaacgctgcccgtaattccagttccaggggatcttacatcctccggttctctagttatggcacacctgtggcatgcatacctaaacagaagataaaataaaataaaataaaataaaaacatctctttgctaaagatacctggcatttctttatggtgtgcacaggtggctttctcatataaatgttttctcagatcacctgagttgctattgatatgatatcatttgtaatttggtaaaatctaaaggctgtctgatggcccacactagttaaagcatcaggccctaaggatactgagagttgactagctgctgttttgcttttttttttttttttttttttttgtagtgattcattttcttaaaatatctgtggcagattttgaacaacgtgcatccacattacagctaggtatggaggtacatacctttcattccagcacccaagaggcagaggcagaggcaggcctgtgaattctaggccagcctggtctacagagtgagtttcaggccagcaagggctagacagtgagaccctgtataaaaaaaaagttacattaaacatggtggtattattttaaaagtatgatttaagaaaaatgaacacattatctttagagcagctaaggtttgcagagagatcctgtggaagtcatttaacccttgaagcctttcttagaaccacggcagatgcgctttcctgatgtcctgtgaagggttaacccaggaagtgggtaccttgtgagccttgtttactgctgatctttttcagggtgggataattaatgatggctctgcgttaattggccctgctgaggagtacccagagtccctgcctgacaccttccctgagtgtggtacggaaggtaagagacttctttcttcctgtgttccaaaggtttagctgcaggagacgcgtgtcacatggggttgtgcagcagctgtctccaagaggtgggcacctcacatttgcccggcggctttgctctttctccctgctgtatgaaatagtgacttgccaggtagttcccggcagtttctcactgatgacacaatgaggaagtccgatgtcagtaagacgcctgatgcacagacatcagccttgctgtgtatgagtgtttcaagtgcatgtgtgtctgtgacccacgtgggagtattatgctgacagaggccagaagagggtgtcaggttccctggaactggagttctggacagttgtgagctgggacctgaacccgtaagaacaagtcctcttaaccactgagccgtctctccagggggcttaactgcttatgaacatctttttcctttggaaacttgtgtgttttatttgaactacagagacggtggtgggcatgggagcacagcccctgggagcacttctctcctctgcttgagggatgcaggtggccttgctgttaaactgttagattttggatagtgttgtttatttaaaactttggaggattaactgggaaggtgcacagttatttcagttggattaagaagcctcttttacaaggttggctacggcctctgtggtggcatgattgccgtctaagtgtgtgaagatctgagttcagatctggaaaacccccacacagtcaggtgtgacagtgtgcgtgtgcagccccactgtgaggtgggaggtggaggcaggagactctccagaagtgtgtaggccagctagcctggggtgtgctgtggcgaaccggaagtcctgttgcggacaaggtggagctttggactgacgcccaaggttgtcctctgaccataggtgtgctgtgttatctgtttccatgctcacacacacaaacatgcatgacacacatacatgaggataaaaaaaaaaaaaacaaaaaccaaaaactaaaacccatgtttatgtttcaagacagtcactttaaatatcaacatcttcagttggtggggtaactaatgacacaagtctgttttaagattaacctaaactctgtatggtgcggagtatcatgccaaaatagaaagtacaactaaaagcagtttacatgtgaagtagaatttttattctacaaatgtccacaaggtggcaccacgagaactcaaatcttaagggctgggcttctccatcctgtgtcctggtggagtgggtgcctgtcagctttttgttcttaagtgcgtgtttcctcaccgtagttcactttccctgactagttaaaatttgcctcagtgggaaatcctaaaataaatcgggattttttctgaagataaagcccagttggacaatgactggtggtgcacttgggagatagaggaaggagaatcaggaattgcaggccagactcgcctacgtggtgagtttaaggttggcgtgggctacagagttccttcctcaaaacaccaaaccaacccaaactcaacaagtaaacaataaaggtaggcgtgtatgtgggcgtatcgtcgtgtgtacgttgcttgtagaacagaggacactccagggctcttgagggtgatgctggatatttggaactttgtggcagggtgggccagataaaaagttcatgatttgttatggtcacccaggttttggattagaagggacattggatgttatccaaatgcctttctttttcaactagatattggagtgtggcggggtttgagagtgtatttggtataggaatatcagggtgggaacggacagcacttgctgagctcagttcccagaatccgtgttgggtggcgtcacagcctcttgtaaccccagctctagggcactccatgcccgactctggcctcacacacgcatgtgtagggtaacagtgctggaccccggagcccacagaaagatggccagtggaacaacaggcccttgagccaaaagggaggtgggccagagcttagccatgtttctgctgggctgtacttgggaacagagctggcttttgagggcccttctgttcccagtagagacaccgcagagtctctgggactgtagtttctcaaagctgatgcatgggcttctcattagccttgttagtagctttggaactgtggaaggctggttcttggttcctagctgttgctagctgtcaagtaccagaactgtgactaccacagggctctggatttagggatttttcctacaagcttatttagaaggacttctttcttttttctcttttaaaaaatgtattttttttttgtttgtttgtttgtttgaggcagggtttctctgtggctttggaggctgtcctggaactagctcttgtagaccaggctggtgttgaattcacagagatctgcctgcctctgtctcctgagtgctgggattaaaggcatgtgccacaaatgccctgattaaaaatgtattcttaacaattccatatatgcatacaatatacccccacaccccctcatacttccccactctttctggacccctatttctccccaattaatttccctcctgcttttccctatttaatttaacaacccactgagtttagttagggtttctgatgagtgtaggtgtgtggctgttaaccgaagcataggtttctttccatggctacactactgaagaaaagtaactgttctcccagtagccattaactgccatctgctcccagctagggatggggccacatgagcctctcctctaagaagggcttgtttctccaggagtcagatgggattctgtcagatcctcatgccctccacctcctggtaatcttggttctgggctgggtgattttttttttttttttggtgcatgaggcagaagtgattgctgctgggacaagtagactcctttggtcgactgtggcaatgtttgaaccgcagttgagtggaggcgatgagctaatagtaatgaggccacgtgctttatatatagtcacccatgagcggccggccacctgttgtcaaaggaggccgatctctttgtgcggatggtcttcagatgcggggctctgatggctcatagtataaagctcccgcgaacagcagctcaaccttttccccaggcccgcctttcagagatggtgtcccaggcagattctgctctactgcctgactgcacagttcaaagcccagaggtgagggcaggctggtggactgggatgctgaacacaccctcgtgtctgtagctgcttttttaacaagtcacctggggccctctaatagcaccgagactgggatctctgtgatccacacccgggggcaggagactttcatggaacctttggcttccccttgtatcacttccaaaagggttttgagtgatggtgccgtggaagggtgcgcatgtcctaagagtccctgtgaggatgggttggctgtaggttggcttaactttgacagacagtctgtatgttgtatggagtacccgtgctgccctgctcccccaccccctgcccttcctcctcagcgagaccacagcctgtagtgctcctcgctccctttctgggttgcagtctccacttcatgtgatgctcagatgcactaggaccatagcgagtagcagctgtcctctggtaaataaaggaggcattgactttcatgtatacacttgtgtttttcacacatcatatttacatactctatgtgtgcgcacatacacatgcattttccttcctgtctgtacagcacacgtgtgcagatttacatgtgggtatttactgttcatgtctcttcgtacatctgtatgtgtgcacttatgtgcgtaattaggattacatttgctgatcaaataaagttgcaaaagcaggaggaagtgaaactatgttcttagacttttgtgaaaccgagtgtacataatcacctgcctgccttctggccctgctgtgagagggaagtcgggtgcagcgggacagccgtgagaggggcgtggaggtcccagcgaggaggctgtgctgtagacagggcactgttcaacttgagagccattggagagcacaccaacattcccagcccttcccttttaattatctggacgtgtagaactttcctctagccgaattgtttgtcaatttcaaaccagctgtcagatagcagcagcacttaaggaaataagttcgcattgacactcaaagtattttaaaattactgacaaagttaatctagtttttagaaaagtgggtgaataacttggatgttgcaggaagatttgactataaaatgctatctaccagatgctgtctgcgtggccagaatgctccccatgtccagtgatatccatttgaagctgtggggttaatgaattcggttcctttttggaaacaaggaccctaagaatttgaaagaaaaaaataaacaaatgaaaacaatgctgtatggatgaggtgccaaagtcacgtataaagctgatttgaacatggagcttagctgctggtcgcgtgttcttacttttactttctttgctaggaagtgagcaatttgaggctaccacaggctgacaacctggcccccagctgttttcctatagcctgtgaaccaagaatgttcttttgcatttttaaatggctgaaaaaccacaaagaaaattgttttttgatgtggcattacatgcaattaaagttttagtgtctacagctaaaatgagccatgctcacctgtccaggccagtctgcatggcatcaggtggctacagcagaccatgcagctgcagggcctgaagtatttactgtctggctctttattgacaaggaagttgctgaccccttatcttagaattctatagtccgattcacctgcagttttcattcttagcgttgcctcctgtggaaataacttcttttggaaatgtctttttctgaaaacttgacatttcatagtcagtggcggtgctggtccagggatgtgtagttcagtcgtgtgcaatgtggtaggcttgatccacagaatcatcaaaaaaaacccaaaccctgccaactgaaagccagcagacggcagtgtagacctccttctgtgcctgacgtgctccaggcagtgtgatcgtgagtcttgactcctagaatctgcggctccatgaaagttgagacctgtatgtgttcctgaggcctccaagggtccacaaggccaaaacctttttaaaaatgcagtcacctctgcactgaatgtcacacacaaaaccagtgagggtcgaactgttggagacgctgacactgaactaaggtttccatcactcatgggaaagcagcatgcagcagaggggagggaggcgggtgtgagcagagggaggccattttgcttatgtcagtggataaacaggagtcattacactgtgtgtttggtacattttttttatcttgaaatgaatgatctgacttttcaaagaaaagagctcgtagcatttgtttccagttaaagttttcctccccaagttaggattttttttgtgtgtcacttttgtctgccgctttgattgtgacatttcccagtgtgatttttatgccataataatgaaatgggagtttttatccttgggagaattgtggcactcagggaactgacatgttaaaaataattgatttgttaggctgtaaacagcatagataaaagattattcaagacagaccactgggtttaaatgcagtcagccctacaaatttcattgttgagattttatgtattccacattgcagccctctttaagagcactgtagagttttgtagtaagacaaaatgactcagcaggtaaaggtgtttgctgcctgtcaacttgagttcggaccccaggtccgacatggtggaaggaaagaactaacttcacagtgctccctgacctccacacacgctcctccccacctccaagtgataactcagggggacacagtaaacacagttgtcttacaacactttcccttttatccacatcttccaaccacaactgtgtgatgacagacagggccagggccagggagtcctcatgttctgtttagccagacacagagacttgaaaaatatcagattgccacttctcccaataagtatttttttcttttgacaaatgtagttattttttataaagtacattaatgtgtaataattatagtgttttattttgagagatttatttttatcttatgtgtatgagtgtttgcctgcatgtatgtctgtaccatgtgtgtgcctgctgccctcagaggctgcaagaaggtgttggattccttagaacctaggttatagatggttggttacaaggtacagtacagcatctgatgccccaagctgagacagtctgctagaacctgccagccaccagcaggccatgctgccctggctgagcaggttatgggagagtgggcgtatgtgtggcttgtggccctgtggctactgctagtctcacgttgacttctgtgctcctcgctccaggcttctccagtgatagcgacctcccgtccctcactgttgacgcagactccattgcagaggtggacgatggaatggcttcccgtcagggttctcccagtaaaacttttggtctgagtctgtctgcggattcttcggcagcaggggctggcgcttctgacggtgaaccgagcaaagcagaagaccgggaaagccggaccctcttccccagcagcttaaagccgaggctgggcaggagagattacctggagaaagcaggggagcttatcaagctggccgtgaagaaggaggaggaagacgactatgaagctgcctctgacttttacaggaagggcgtcgacctgctcctggaaggagtgcaaggtacggtttgcccgcagtgcgtcctggcacagctgtgtgctgtgagagatgagaaccatcggtaccgagtccaacactctgcgtctcctgtgctcagggctggaaatgacatcatcacaggtgctcaacactgtgagcagcgtccccacaggcgctgtgtgaatggatggcagtcttcctcctgacttgaccgtagaattctcagagagtgctgactttactctcagtgactgtcaccttcacctagttagtgcaagtgacaggaaggtgtgggtcccagcacaatttagtgtctctaagtagaacttaccgattttctctttttaagtaccaggatttatttttcatcacagacgcagaataaagtgccccgtagttagtgaagtgacttcttggacaggacgtaatactcaaaggccaatgtgactttcttcagggtctagaaagccattgctgcctcggttctgtgctctttgacctactgattctcatctactgacacttccttcagtattttctctcagtacacatggtaccctgttattctagaaccttctcctgctctctttctagtgtgtgtgtgttcccacactgcttcctatcaagcgttttgactgactttctccttagaaaacaccctttttagattttactgtatgtccatgagtgcttgcctgtgtgtgtctgtgcgaatatcacatgtgaccttgactccctgggaggtcaaaagaagtcatcaggccctggaactggaattacagacagctgtgagatgtgttgtgtgggtgctgggacctgacccaggatcctctggaagaacaaattgtgcccgcagaagcaacagaccctctggagctgaagttacagttggttgtgagccacctgcaagagcagtatcgctgttcactgctgagccgtttctccagcccccatctccagactttgtgttgggccgtggaagtatgtgtgtatgtttgctaactgttgctgatggagcattctgacctcgtctcctcttttacaaaaaggggtcatgagatgctcttttctcatccatttccttcctagtttctaagattttgttgctcttcttatttctcttagcctctgctctcgaagggctttgccccaggccactgtttctgctgtcgtgctagtgccccaagccactgtttctgctgtcatgctagtggtgtctcaggagtgcagagatgagtatgtaccactgtcatccttgcctggaggttcaggttgccagtgtcagcctgtttcagaagctggggtcccagagctgtcaacatctatatacttggaaacaaaaggagtggactctttccatcttggctagtggctgtcatcttgctgatgttgctggatgcagtcatttgattgtatcatttgattgtgacatggcgtttcaatagctgattctatctgtgaaacttcagcttttaaaattttattttagctgaaagttctaacatttcaaattgagaaactaactctgaagtcatttgttttcatcttttgattggtggatgattttggacccaatttgattttttaaggcctttcatagtctgctggggtttgtgtgtggagtattctgtctaaagggctcttcatttctgttcctttccctaactgtcatctagagttggggttgacagtggcatcgattgagttgcgtctttcttctctgatggttctccattttttccaaacataaccagcttgcaaaaacatcacaggtatttaattggcatgggtgagccatatcattgtgacatccttctgtctaaaagttattagggacacttcataatgttgccacttgatggcaccagaaaaataaaaatagttgcttcacgatgagacgtgtaagtgcagatcagcaagcaacagagactcactcagctggttatttactctgcattgaactcgctaccaagcccactgaggtctgtccaaagtccagctacctgtttaatctctttctgtctttctgtgcaatgtctgtctcaaaccacagagtcccgtctgctcctgatagcatttcattgttaatacgccatccagaaagagagcagttggcctgtagtgttttattgtttacccacctcaaaatggctttgtttagacaaactatgagaccctcagttaccaaattctagtttttttcactcagcttccagctatgggactctgattctttataaggaacatgtttctgtccgtgcagttttgcacgtgacaatgtgtaaagtgtggcttcagagcagggagcacagtctgaggactctgcagagtgagcacagtctgaggactctgcagcgggagcacagtctgaggactctgcagagggagcacagtctaaggactctgtggcagcacagtcctcatcaccctgtggatctgtgagtgttgtccttgggcctctggcttgttcttggtttgacattcatgctcagaaaagacccatccttggggaaagtttattctggtgtgacagaactgtcactgaactgtcctgggagtcagtgagacctacaaataaagacctgaggctcagctctttctaggcagttgttctcatgactggtgtgggactgtgggctttaaaggttgtaaagtgccgctgcttttcttactaactagcatttcatagcagagactaatgtaagcatagtggcacagacctgcccaagagcaagagcatcctgctggggggtggggtttgccttctgtgacctcaattttactagagatggttctcaaaaggaaggaaatgccgttttctagactctcaggttgccatggatttaaaagagagagtctgaaagtcaaggttgtaggaatggacttggacctttgtagagaatgggtggtccattccacactgtccttccatgttccgtgtcctcagagtggacttgtggggagagttagtataaacagcatggcaaacggatggcgaaaggactaatgaattgtttaagtagtggcagaggtggcggcggccgcagcgggcacaggctgccatgtattaaatgcccatctcagcaccagcgtttttcttctgttatttttaattttcaggaaagccaaagctgaattctagctggtcgtactgggcattgtctggggaccctgaaatttagagggtgcaaatagttgatacaatgacctaaaatggtggcacttaattagtaagaataatgatttaaaactggaatctgccggatggcaagcatcgttcctgtcccacgtgtggttcccctgggaatcaaaaggctgagcttgctgcctttggctggagtgtcttgattgccgcagtggcatgcttacttcccctcaggtcacttcaagcctcactttgcggtgagcaggccgaggccccagtggagctgtgctgctgttggtcaggggtggtggtgttgagctggggtggtgttgagctgggggggtggtgttgagctgggggggtgttgagcagggtggtggtgttgagctggggggtggtgttgagctgggggggtgttgagcagggtggtggtgttgagctggggtggtggtgttgagctggggggtgttgagctggggtggtgttgagctggggggtggtgttgagctgggggggtgttgagcagggtggtggtgttgagctgggggggtgtgttgagctgggggggtgttgagctggggtgggtggggggtggtgttgagctgggggggtggtgttgagctggggggggtgagcagggtggtgttgagctgggggttgagcagggtggtggtgttgagctgggggggtgttgagctggggggtgttgttgagctggggggtgtgttgagctggggggtgtttgagctggggggtgttttggggggtggtgttgagctgggggtggtgttgagctggggggggtgttgagctgggggatggtgttgagctgggggtggtgttgagctggggggtgttttgagctgggggtggtgttgagctggggggtggtgttgagctgggggggtggtgttgagctggggtgcaatctaggcttttccacatacaaacctgtttcctggcacccctcacccagttctcttgatcgcacgagccttgtgacacggagacacacgtattcagttgtgcactggattttgcacattgctcccttcctgtctcttgttctacgagcttctgtccgtccaggtgatcatcccgcaagcattgtttacatgtatgtaccacgtccataccatgcagagacagtgaactgagtcatgtttgtgatggctcttcctaatgacactcctgtcagccctggtggtgtggtgcacgtcttgttgacggtttggtgagttttctgtccggccacacctgtttttcagggacttggtggcaatgccacagttgtccatttctccttcccctattcctttttcctttgacatctccagtacacataatgaaggagatttataatgaaaattctccagagttattattgaaaagttttatctttggaaattctgttgatgcctgtcaccactgcaactggttccagtgttacgacttagcttagagacgatgcaatttcctttctgttgttttcattctggcaaaagatttaatagtgacacccagcctttcccacagtgcacaccaccccagtcagacgatgagtgtgccccatgctttgctgttctgtcttcctgggctctgcttcttcgtagaagaaaccatggactcatatgtacttctaggggactgttgagtcaccaggtgggctctaagttaagccatgtgtccagtggctggttttaggacatgcctggaccttgctgatggggctgcactctgtcatccatgcttagaagctgtatgaagcagtttcagtcattggttcttcccatggacgagagttgctcacctggggctggagagatggctcagaggtcaagagcactggctgctcttattgagatcctgagttcaattcccagcaactacctggtagttcacaaccatctgcaatgagatctggtgccctcttctgacctgcaggcataacactgtatatataataaataaacaacaaaacaaacaaaaaagagttgctcacacatttggaaaccctgtggatcatcacgtttgctttaaagtggacagacagacaggcaggaaagtgtgggtctgatggagggaagcaaggctctctgttattattggatcttagaaatggaaaatgccctttaaccccgagttacttgtctccccgcttagtgctataacatcatattatggacgcatttcaagttccctttacccgtcgctcacttcagcacaaacattgctgagtgagcataaggacagctgtgcgaaaagctggtgtgtttttgtccatatgtgtgcctgttttgggaaggggtctgttgttccctgctgtgaatgctcgggtgtttggccacctggtgaccagggattctcttgcctccaggtttccccaggtgtgctgggctgtggctttaggtgggtgccgggtctgaactctgatccccacacttgcactgcataccttttatccaccatctctccagcccatgcagcacctctgtcggcccagaagtcgctgttcccaccaggctctctgccttgtgagtgctgggatcacaggtgtgcaccatggggtgtggctttgagatggtgcaatgtcccctaatccaatggcttccctccttttgcttatgaacctctatgagagttccccccttctcttttggtctaattttgactctggggcacctggcaagcttaggtattttgcatttccgtaacagacagtttgggttctgataagaattgcttaggttctgtgagtggttccggtgctgtcctttcttgacagttcgtcttcactgtggactgagagggaggtctcccacggccttatttcctccgctttctgcaggctctcactgtttacagtgagggggcctttacttctgagtggagttcctgctcactttggggtgctcttcttatgaatggaattacgttttgttttgtggtagattcattgttggtgattgtaggttcagttgcgtttatatgttgatctgtctagcaccttattgaactggcttgttacatctggttgttttgctgtggactgtctggcatgagcacatgcgcacatacgtgagtgtgacgcactatttgtgaataaagcaggtttccctttggccaggtgtgccccctcttgttcttgccttgtgcctggcaattttcagaaagcaggcagccttggcaggtgctctccatcttcccatgggcgaggttcatctgtgtagatgctgctgagcccctcctgggtctcatttctttttgtcttgcattggggtccaacggttgctctgctaccacgcaccttgcacccattccctgctgttggctgctctaagagtaagtctccttgccacagagatttgtgctgtaatgtaagtcatattgtggtttttgttatttctttttattttgttcatcatttaatatggttgggaaagagatcttttcagtgaattctgtaatttttttttaattctaaaataaagatcgtacttttccctataattcaataaattgccttcattgagagtttctcagatcttttttttttttttccctcgaggcagggtttctctgtgtagctttggagcctatcctagaactcgttctgtagaccaggctggcctcaaactcacagagatcctcctgcctctgcctcccgagtgctgggattaaaggcgtgcaccaccaccgctcggcaagtttctcagatcttaactgttttgaagctgcctagaagaactttaaagccctaaaattgagactaaaagtgtaaagatttgaagcagtttaaacaccagcagcttccctctgttttctgtctccactggcataccagtttctctctgagaggcaggtttagaagtgaaaagtgagccagcagaaggcagccggaggcggtgagctcggaggactattgtgtgtgagcttgcagaaaaccctttcccgttgtcatccatgctcacaggtgaaggcttgtctttcaagtgacctctagtcctcagtctttcctctcagactgtgtatgggtaacaaaacccttagcaactcaaagaagctcctgtacaaaggacgttagcttagaaaagtgctgggctgtgcactcacctccccttagggcctctgtcttgtgcatagccctactctggacacgcactgcacttgctgttccttgctccaggtggagccctgggaccacgagggaagagggtatcttccctcatagttttaatgaatgcccagagtttactggcctgttacagtcagtgccctcacttgttttcctgacttgacaagggacagtcacccctgctgcactgggcagacttgtccctggttggtggacgcctcctactggatagaagaactattgactgcacaagagtgggctagcaccagggaaaacaaaaccaactgacctgggacccccctcctcaccctcctggtgggcatgcaccctttgtttaccttctggtggttgttatttattatttcttcagctgcctgtgtaaaaaggttgtttgctgctactatttgtagtgatatcctgtctgaaggtcagagaatggagcttgcctcttggtaaccatagaggtctggaggtctgtgcagagaggcaggtaaccatagaggtctggaggtctgtacagagaggcaggaagtgagctagctgggcctctacctcgttacccttgatttgtctatgcatatttttattttttatatgtgtatacttgatgaatttcaaggtaaattatcaacatgatgtccttttcccatgatgcacatgaccagaaaatgggatctttctaaatattcgaagagaacagctgtagagggaaggttttaatagtggattcaacctgacagctgccaaaattaggtacctactaaagaggatatacattgcgtttctgttgacttccttgtttttgtcaagcaatttgccatttcacacaaatggtcatgtttgttaaaatcaaatataacttcatgttttctaagactgaattctgtgtgttacgcattaggtcgacaaattgccgaccactgagctatatcacgtgcagcacttaaattccttttttaattgaatgggatgtgataacattattctgagataattaaagcattattttattggctggtaggtggaaaagaccacaaggtcagtaaaatgttgacacgaaagttttcttgatgagttcagagcagtgacggctctagaggaaagccctgtgtggggacggtgaaggacaaggccaccgagagagaagcagggagtagaaacacagaatcctgtcgtggattttcttaccaagatctcaggaagtgtccttagaagaagggaatgatgaggagctgcagtccggccagaccaggccagtggtggtgacggtccttttgaatgaagtgacctagtccttgtggaaatggaatgtagtgtaatccagcaagtgaagcccgtcagctccatggcctggcagtctctagagcaggtgtgggggcggggtctcattctggactggctggtggggtcaggaattcagtgctccttgattggaactgggccctcagtccccagcctcgttgtgttagctcatgcccagccatcagtgacactttcacacagcttctgcctcaagagccttttctggccaggcggtggcagctcacgcctttaatcccagcactcgggaggcagaggcaggaggatctctgtgagttcgaggccagcctggtctccagagcgagtgccaggataggctccaaagctacacagagaagccctgtttcgaaaaaccaaaaagaaaaaaaaaaaaaaaaaggagccttttctgttttctcagtgatggtgtagtcggttagtataaagtggtttgccaggatccccggaacccatgggaagcctgatttggtagctcctgtctgcaacccggtattcctacagtgagatgagtgtcacacacaggagttcctctggaagctcagggacctgctggcctgctgtcggcagtgatgatcaacaagagacctgtcttccaggggcggtgtgaagaccaatactgaaggttgacccctgacctcagacatgtgttgtggcatgtgtgtcccattgttcccacatgagtgtctgctcagcttgagagcatgtgtgcatccatccctacagtttctactgctggccaacatgggtaacagggaccatatatcctctttcctgaagcagaatgccacatgtcagtgaagggccctgggttctgagaaacaggaaccaaaagaagcaagactcgtgagtcctttgattctggacctcggtttccctaggctgtggcgaaggaagaagctggcacagggctcctgcaggatttcagagctgaagaggtacagttaaacagccaagaagaccaaagctgagccacagttagggcttgctggctggggatgcaggccctgtgtatcttgtctggagaggaggttgccacagtgacagcaaactgtatcccgggagctcagcactctgagcagtgcacactcgtgtgaagtcaacactgaaggaacaaggggccactctcacggacggttgtgcagagctgagaaccagcatctgctgcagagaggcatcctgactaattcaactgtgggcaatgctgggatgctgagaagccacgaagaaggtgtatatcaaatggtaaaaacaagaccccagagaattaaacatcctaaaatagactcaagaactaaaaaaactatctaaaacccaacaaagaaaagtttactgtggccgagagccagtaaaacaccatttgttcaaagaagccgggaaggggaccttaaatgaggtacaagtgaaactcactcgcagcagtgccataggtggtggggccaccacacagggattcattctagctgttgctgtgtgagggcgtcaggcggaaacaggcatcacagaagccccaagagcaccacagggaagagctacactgtcagaaaaaaaagtactgtgtgcaggaggtaaactgtttgagaattattattcatgcccagttcattggggcggatgatgagcagtcgctgtgagccttaaatcttggtcaggccttgtcttgtggctggtgggttgtctgccccggagaatgtctgtgtgtgcttgtaagcactgttcattctgatactatggtagggtggtctgcaggtgccatgccctgcaggtcggctgaaatagtgctcagttcttaacatcgttttctgattgtctctccctctcttttttcttttcttttctttttgtttctctctctcttttctttttcttttatttttttcaagacagtgtttcactatgtagccttggctgtcctggatctctctccatagaccaggctggtcttgaactcacagagatccacctgcctctcctcctgagtgctggggttgaaggcgtgcacctagccattttctgtcttttattgagatgtccctaatattgctgaattgtctctctgttttggtaactttttctttctcccttttgaggtcctgatggtaattattccatttctgattactttgcaattcacactatagactgtctggttttgtttcttgttctactttttcatgcattttgttggatattcatataatatgctatgattattttttacatagcatagtcttttctgtcctttacctgtttgttttttgtaatcagagtatcttgctcacaaacaaggggcagtcagatccatttttaacccagctgtggaattatctgtgcttcacacatttaatgtgactggagttacctcagttttcctggtgttgctgtggtttcagttttcttcttttgtagtaagtagatatttcccagaatatcatttcatctttcttaaagctgtatcaccttgcagactgcagaaataaacatttttgtttgaagtatctacttcatggtaagattgtcctaattgcagtaatactagcactttgcttccacgttgcttcctccatgtctgcctccttggttttcttcttacatagtcttcatattttgataaatgagccttataatgtggttttacagttactgcacttgtaatcccagcactcaggaggttgaggcaggagaattgcttcaagttcaaggctagcctaggctacatagcaacaatctgcttcaaatgaacaaaaaacccaaaataacaacaccagaaacagcagcaaacaaagggatggaggagggggtaggattttcttctttgggtgtttgacccctaggtgtttgcgtgtagccttggtctctttgaattcggtcctggtgtttgctgtgtccttggtgtctgttggcatttgtatatgtgtgcatcggtgtcagtgaagcatgggcattttcatctgctgcatcttccacaggtgcctgggcctctgttggcttctgtttccttactgattgctcttggtgactgtccatcagtcagtctgtccgtctgtccgtccgtccatccatccataccacccatctgtccatccatctacccatctatccacccattcacccacccacccatccacccatctacctgtccatccacccatccttccgtccatccatcccttttcattttgccagctcagtctgccctttacttcatgctataattccttcagcatattctcttacagttcctgaaccatgtttgtactatttgtttttcctctgcctgttaatggacccctgtgtgtggaccccatttttcatgtttcctttcgagtcacctgtttcctaccgtgcgcagaacttgacatgctgggttccatggcaactcgttctctgggcagctattgctgctgtcttttgttgtgttatttgtcactctgttcatagttgtgtctcagctgtggccttgaggtgtgtggggggtagtgcctgtgtccgtgggtaaggcagtctgcaagtcttccacggctttggccttctgcttgtggcagaccacccattagtgaggatgagtaggtcctccagctctctgtggccctggggcaagtgtgcaacttgtaagaccccaaggatatttgggggtgtacagggcatactgtggttgtcttgttcctcgatgctgatttcagagtccttacttccttgaagtttcaatggagatacaaggtagataggtgagtcctcacagccaccatcgcattaggtttgggagcagatagaagtaactctgtgttaaaataccacaggcctttggttttctaactttacacacacacacacacacacacacacacacacacacacacacacccttcagttcttgtgagagaaggagatggtacttggagaaggcaacagggagcagggtcttgaagattgtggccagcagccatcaggcagaagtgagcttgaaagtaccagatgagtttaaatgtcccacctggggtgtcacttgacagtgcgtgtgacactggaccccatcatttgacagtgagagtccagctgttgaaaagtgtcagtcatatgtgttgttatatttatactatagcttgtaaagtcggagacttctagcctcagcatactggtagcctcactcccggttggtacctcagtcttgtgcttcctgctgccctggaactggctctgtgccagcaagcccctctaacaggcttggcagctgggcaaccgtcatttgcttggctgtgacatttctggtctttgtggaaacaacatgttgacaggttcctgtggcccctcgtggtcgctcttgttcaggagaagcagtgtcacagtgacagtccattgaggaacataggagctagtcaccaaaggttcatatcagatagttaagcttctccgtgtctaacacacggaactttgtctgtgtgtgctcccgaccgccaaggcggcgagctgctgtactgtgcccatgcttttgctttctccctttgtgtttttagttctctttaaaatgtatacacacttatttattttgtgtttttgtgtgactataacatagcacacatacacacacgcacatgcgcgtgcacacacacttgtatatttgtgctctatggtgtgaacatggagatcagagctctcttctcctgtgggttccagggattgaactcaagtcatcaggtctggcagcaagtatatttacctactggaccccatcactggccctgtacttgctttttagacagggtcttacatagcttaggttggcctggaacttgcaatgtagcccaggctatccctatcctcctgtgtttacccctagagctgagattacaggggtgagccaccacacccagctgtttttattgttgtttgtttctatggggagaaggcactgggaaaacttgaatagaatcgtgcctcttgtaattttagatttagttgcctagggaaacagaacttgagaggtcacatgcattgggccatcagggttcgttatgatgacagcagagaggggtgtggtgtggtccctgtgggttagctcagcagacagctggcacaggcagagtgggtttgggaagaccggattcttcacttgtcagctcagcgcacactgggtggggccgaggagccactgtgttgctcggaagcagcacggccactaaggtgttgacgacagggtgactttgctgactgtttcctatgggtggcaacgatggggtcccccagggtggcagtcaggggaagaaagtcaagatttttatcaccatatgctccttggatttttcactattttcatgtcaacctttatgccgagagtttcacattttaatgacaaaaatgttctgtggaaattatagcttgggaaaaagcagtgtgcttccgcgcttcagaaaaagctaggtaaagcgctgatgtgtgtaaagtagctgtggagttttatattccgattgtgtgagcagtaaacagagcatctgaaatcaccacttgcacattgcagcaaacacatcatcatccgcttaaaaaagagttataattacagttgacgaagcatggacaccataaaaaatgcattagtgtggcttgacacattaattacctgtttttgcagatgtttttatgtattgttgtgtgaacagtttacaaaataattataggaaagtcatatggaaaataaactaagtgggtggcttcccatctaaatattttcattcatgtgaatctgtgtgaggcacagctgccgtgcagcagaagccagggacagagaactcactccccagggttgggcaggcgacctctgcctccagctcagcacgcttttatatctttagcaataccgtttgcaaacgttcacctcagaggactggattaatccctgtgattactaaagaaacccttgattcctattggaagaaaggtaaatatccaggaataacgtaagtccaattaaataaaaaataaacctcaaactccaagtggaaaactactgttgttttagcactgataggctattagactattagaatgttcaagagaaagtcttgaacattcgtctgtggttccagcataagaactgtgatctgtaactcagagcttgccatgtattcatgattaaaccttctgtgtgtaaattgccaagtccagtctccccgttcttggtgaaagtgtgagtctggcttttctcagtggctagcttcctgcagtgagtgacctcagaagcgagagtcattcacgaattgccgaaccgcagggcatgccttctgtgcttttacaggccattaagaaaggtatctttacagccgggtggtggtggtgcacacctttaatcccagcacttgggaggcagaggcaggcggatctctgtgagttcgagaccagcctggtctacaagagctagttccaggtgagcctccaaagctgcagagaaaccctgtctctaaaaaacaaacaaacaaaaaaaacaaaacaaacaacaacaacaacaacaaaaaaaacaaaaaaagaaagatgtctttacaactgtagctgtcaaggaggagaaatagttggtagactataccctactcactcatgctttccaattacttagagtgcccgtgtttcttgttgatattgtcttgacaatttcaaacaaaattatgtcaaaatgtcatttctccttttagtgtactcttgctcttagtactgtgttctttgaggttcccctgggttcatcttagctacttcgatcacgtcttgtgtagtcggtgttttttaggaggaaggcacgcaggtacagggaggggtaacagaggcacttgtagctgtcagggtacagtctctcctcccccaaactggagaaagtcacaattagaagttacaaatgtgcccctctaagtcctaagtcctgtgtcgtcctgcctgggacatagataagccatcctttttgtctagcacgtgtgtgtcgtgctcctgcatgagcatcagtcacctggggcttgatcaccagatccactgtttgtggtattgtagtagatttatgtagagttagttctattggagacctggggtgtccactggatgccttgaacagacctgtggataaggtggagaccgctgttttgtttgtcagacattgtaacaccggtgcagccatccatgtgcgtgctcagttagcgaagtgatgccctgtgacagcactgaggacgctagctagcataatgtccaggcctcaaccttgaaggggagggagggagggagggccagggctaaatggaagtttttctctctaactttgtctgtcacaaagacccctctgagtcctgtagttagttgacttgagcagtctagtccagggtgggagaggtgcagcttcatgctgaagtggctcatgggagcttctgtgctcgggttctgagggtaccacatcagtttggttcttaaggaggggtgtgtgagagctggctaggtggctaagcgcagcaaggcatttccggcaaggagagatttgacttctgcaagttgacctctgacctccacttgtgtaccgtggcgcacacaataaagtaaatacgtgtaattattttttaaagggatgtgttatggagcctgtgaaacttctaggatagcaaataataaaatgcttacaattacttgtccattttacttgatttcaaagggaaaaaaatgaagttagtatgattcaagaaaacagttaccaggcgatagtgacacacacctttaatcctagtacttgggaggcagaggcaggcagtcggatctatgagtttgaggccagcctggtctacagagtgagttccaagacagccaaggctacacagagaaacccggtcttcaaacaaacaaacaaacaaacaaagagagagagagagaaaaagaaagaaaacagttgtgtttggagagatgactcagttcctaagatcactgactgctcttccagaggacccaggttcaattcccaagactcacatggtagtttacaactctctgtaactccaggtccatggggtctgatgccctcttctggcctctgcaggcaaagcacccacacatacaaaatgaaaacaaaccttaagaaaagagaaaacagtttttggggttggttcttttatagattgctacatctattaggatgatgttagagatccttccatatttaccagaaagtcagatattaattcgtatggttttcattccaacttttcttgtccatattataaagcacaacagtctttttgcattttagctgataagttaattaactcttatgtgtggggatgagtaggcgctcctgtggaggttggagagggccttgatggagttggttctctccttccaccttgtggtctcaggggtcaaactcaggtcatcagacttggtggcaggttgtcttactagccttccttttgagtattcattctctgtctgtctgtctgtctgtctgtctgtctgtctgtctgtctgtctgtctgtctctctctctctctctctctctctctctctctgtctctgtctctctctctcatcaaaataacctgttagctaccaatcttacttggtctgtctctgtctctctcttctcgggatgtagatgtcaaactcctgattctcctgcctcagcctcttgggctaggaccaaagatatgtgccacatgcttggccaattaggtcttttaatgtttctttcgatcctttaaaaaaaacatttaatttgagaacataagaatgttagaaatttaggagttgccagagtttcttgtcagaggtgtgggtatagctcagtgtgggtcttgtgctgcatgcatgtgacacactcaaggccctgctcagcatagctcgtgtgtgacacgttcatcttagcactgaaacaaatggatagaccagacccagccaaagagccagtttttagtcaggtgtagtgacacaggcctgcaatgttcgcattcagaggggtgatcctggaagatcccagtactcaggaagccgaggcatgggaccaggctgacttacacagcaagactgactctgtgccccccacccccaccttcccgacaggttttccctgtgtagctttggaggctgtcctggaactcgctctgtagaccaggctggtctggaactcacagagatccgcctgcctctgcctcccgagggctgggattgaaggcgtgtgcctccactactcagcgactgactctgttttaaaaacaaaacaaaagctgggtgtgatggtgcacacctgtaatgccagtacttgggaggaaggtcataggctgtcacggtctttgagaccatgtttcaaaactaaacggaataaaaagacccaacccagctggccttgaactcgtgaacatctaccttgtttctgagcactggaactaaaggtgtgtgccaacacacacacacacacacacacacacacacacacacacacacacacacacggacagtgatgatgttttgaaagagagaaataaaaatcttttggttatttccttttaaagttgcaaaataaagaccagaaagaaagagtcgcctgagtggctctgtgggtggcggggagcacaggacccgctggtgctggctttcggagcacagaggagcctggaaaactgtgacagacatgacatgggaagcatccatgtgcattgttaggacttttgctttagctgttcttggtgatgttttcacttctggggttatttaacaactggttttgaggacaacattgataggggattggcgccatacaaatacaaagcagattccccaactgaccggctcttgtaacacactgagtgctgatggcttcacctcctgcaagatgtgcagatgcgtaaaccattccttctctcaaggctgccttttgtttcagaacacttaacgcaaggcggaatcggtaggctgcatctgagaagaacaaagcatcattaaatatagtcaatcatcacttaaaaactgtagccatcaaggccatctcaaacaacagcattcatttatgtgacccagttgtaaaacaaaaacaaaagaaaaagtaaagaaaaagcaacaaacactgcagtgtacatagatgggcctgatgcccttgctgaagtgatgaagccccaggaagctggagacttccctgtgggccctgccggggcagaggagagctcaaccatagggtgtgctcaggagagtccagtgtggggaccaagttctgtgcaggtggcaaacatctggctaacacaccccggaagcctctggaacttgctggtgagggacacgtcacagccacctgtctttggagaagtcagagctggccagttctgcattcagcagtgagggcagatgaagtatggtgggaagacctgctcctgacatgggtggcgaaactgggttttgtttcctgcctgatttagaacatattctttgctctttggtagatacatgagaaaagactctggtttccaagtaaattctgcgacagccaagatgtgtgaaagatgttttctcccctgcaagaaccatttttttccctcatagtcatactgctacaacttttttctcagaattacgtcaaaatgtaacctgcctcccgcctgcccgtccaccctcccccccttccacccttcctccctctcttccgtcaaattatgtagcttctgaaccagattcttccatgttcctttcaaagtgaggccgtagctatgagctctaatgttctgtgcatttgtctgtttgcctgggtgtcccctgactctaccagctgtggtcctgtgcaccttctcgtgtttagttttcttctttgttgcctacttactgtgcttgtccttgccttgtttgtttgtttgtttgtttgttttttccttcttcttgttctactcaaagaggacagtcagtttcaagttctcttcctttcccctttctgtgccacatactgtacgggggcagcttgattgtccaaggtcagctggacccatggctttgtgcctgagactggcaaagctgctcacctcaagtcagctaaggagcagaaagagcagagagggacccgggacaaaaaccccagtccagtgacctgctttctccaatgagaccctatttccaaaggtttctgtcaccttccagcagtggagtcacatgggtgactggggaggtcagaatctcaggagtagcaattgctcagcggctgcacccagctgagaccaagcctcaccacttaggtctttggaacagacctcactctcgaggcaggaggcttgcagcaggcaggttggggtaactaaaaagttttgaaggccaatgaatcagttcgttcacgtatcacttttctcatggctatttattcttcaatgaagggggttcctctcaaaagctctctttaggttttcaacttgaaagttctaataattttcccaagataaactctctcttaaagttctttttcaaaagttctccttaaaaattctcatagagttctttctgaaagttctccaaaagttccttctaaaaattctttcaaagtttcttttaagaattctccaaaagttccttttcttcctacaaggattccagttatatacccacagacacgtttaacaactctctgacaactgtgcgtctctcagagccagggaggtagataagattttgataaaagtgtctcatgtcttggcagggcaaactcaagtctcagagggaatgcaacttgcaaaatgtgcagttaactgattgaaggagacttctcagcgctatatcagagggaaaaactaaggctacgtagtgtgagatctagagactgctgcttcagtctcggtgagcggtggggcactcttaccactgacacccaggagaaggaattcctttctctggggcctatttgagaatgcaaatcacccagtatatattctatatacagcccaatcatattaacaaacattctggagttgatacctagaatgttaatcgctacttctgtaataagtgataaaggctcccaacacctcaccccaaaattggaacaggatcacttaggtgcaaaacctcacattacctctcaaaccaagaaaagtatttctcgtcctgagcttttgtttttagttatcaaagagaagaaatagctttttccataagtagagtgtgggtcaatgacagggctcatggtcatggcttcttgtgttatttaacattcctatggtctagcatagagagagtgtgtcctttgtaaaacatcagagttatgtctagagaaacgcaatttttaactttccttttatatttaactcaatttttatgtgacactagaactttttggcaggacagtgattgtattcacatggtcccccagaagtcctcttaataggctgtagatgtgactaggagaggagtctagtcagttggcttatgccatcagagtctgagtagacacagtggctgtcaagcctggggaaccaataagctggatggcttgggacaagaccggccagtggctttgtctggaagcttctgggtgagttgctgggagcacatctagaggctggaggatctagaggccggtgtcattgtcagggtaagtgggaactcaccctgcttcggaaggatggggctgtgcaaggaagctcccttctgctccagtcccccaccccacgggcctgttcagggcgattccccacctcagctgccttccccacatgtccatcgtctctggaaacaccttctcagacatccagagatctgcttatcaactttctggggagtgtttaaagagtcaacccagtcatcttgacagctaggattagccatcagtcttgaatagtggcagtctttcttctttgagtgccaaaggccagtgaaaattttgcttcatcagagccattagtttttactcaattaaagtctgtctgaagccacatttgcgaacaaggtgacgagttagaactgtgctgggaatctgcagctttatctttgtgttctggtctggcccacaggcaccgcgcggcagctctctgcaagggctggtcttcatctgtggctgctgattgccagtcaccgtggcctttgaagggctgagtggaggaatcacagaatctgtttgtggaagatgcattctgcaggcctctcagtatttctgccatgtttgtagtttccatggaattgggccaccatcagcagcaggggtccatttcagcactggcttccagtccttgtttctctgttactatggagactgcctagaaagtggcagaaaagccaaaagtttgaaacaaaaaacaaaaaaacacaccagcaattcaataacaatatatgactggcactgtatgtggctgtagccatgtattccataactcagcgtgaccctcaagttagcacgtgacacaggcgcagtactttgaacagagccaagtttgaagctcaacaactggggtggaacccaggtgaacagaaacgctgaacagaggctgaagtcagagcctgctgaatatcacctatatgtgaagagcaagtggggggtgggcatcacagtcccaaacggtgagcccagtcacatcccggggcgcagaaccggagagcagcaccgactgtgtgagataccatgtctaaagcgcacggcagctattagacaattttggtgtatagtgtgtgtgtgtgtgtgtgtgtgtgtgtgtgtgtgtgcgcgcgcgcgcgcacgcgcgctcgtgcctgcttgcgcttgtgctcctggtactcaaggaacaccgtggaatagggggcacaaagattgagccagaggcccaggaattgtaccataagacagtgtcttctgtgtatgacaaggaagctgcacttaggaaacatcaactctatggtcacctaaacgagatctgcacggcgacatcaccagtgacatccagctggatgagggaagcatgaatgctgagaaggagagaatgggttttccccagggaaacccccagttgtgagtgtccagtcccaaacaatctgcactagacacacacacacacacacacacacaccacaccacacacacacacacacacacacacacacacacacacacgcatgcactcacgcacacacacacaccacaccacatactcacacacacaccacatacccacacacaccacacatacacacacactacatcacacatacatacacacaaacacaccatgtagtctttgggggaccgttagtctttgttcgtccttgaatgacatggtgcttcttagtcacacgggtcatcccactctggagaggaaggggcccaacactcaaaaaactcttttgaggtcttgagaacttggaggctgtttttaggaaacagacccagatgtcttaaatgaggtacatataatgtcagggtttcaggcgcattcctgctttcctatgtcagatgagtgacagctagttgctaatgaaacaaccatgaaccttatacaactcggtgagattttcattcagaattacctgaggtggttttcttcttgggctggtctgcatgtttgtacagtctgcagcctgtcagtcccatgtcaccgctcaccaaacaggcgtcatgtttgctcctagttttgagcaggaaattcagtactgcctgaactggggttcccttctcaccctcagaactttgtacagtttcatgtatacctggctctccctaatgtgctgagtttcagtacacgtttagatagccgtctgtcagctttgggcaaatgagacccttgaggggtaaggttgaaaccatttctaagtttgactccaaagttacagatattaagaagccttggagtgggtaaaaagaagtaaattactagatgtggcaaaaagtgcctgtttccctctcacaaggccagacttgtgctttgtcctctcaggagagtcaagccccacacgacgggaggctgtgaagagaaggacagctgagtacctcatgcgtgcagagagcatctccagcctccgggcctcacctcagctcgacgctggactgcaggtatgccagggccttctctttatgttctttgcttttttctctctacctttcagctttatttataactagaatatttgagtagtttggttgtcagaacttttctgtaattttcttaagttgtcagaagggaagccatgagaatagagtaagagggcttgcttctcacccttagccttccacacgttgtctctaccctgggcaggtgaggacaagagtttaaggaaggaagattgattctggctgtctaggcggtcatggcagggaggggcatggaggcagaagcagctcagagcttgctcacatctacgaggagcaggaagcagaggggtgagtgcggcctctgtgggcttgcatcttttcctcttttcctgaatgtgtggtgctgcccacattcagggtgggctctccctcttccttcaaacctctctggaagcatcttcatagatgccccagcagtgtgtctcctaggtgattccaagtatgattgacagtgcggataaagcatcacacgtgcattgtcctaatctcaccatcgtgtaagatgccatgcttattgcccacacccctgctcttgaacttcagaagtcacagctctcctgcaccccgagcttgtgaagtcacagttctcctgcaccccgagcttgtgaagtcacagctctcctgcaccccgagcttgtgaagtcacagctctcatgcaccctgagctgctgtatcagttatgttgaaactgtcctgtaaggatctgctgtgaggctgcctgtagctgctgaggcacaataatgtaggggtgttttgggctatttgggactgccccaaccctgtctgcatggcataaagttttagaaacactattatttattgcttttatgtcaggtctatctgggtttggccagtttctggaagtagcttttttattttaaattcttactaaggttttctgtaaatgggaaaaagtgtttagtttatttccttaattgatccaaggggcaggtagtcttggtatattctgtgacttgaagccatgaaagacacaacaaaaattctttaaaaattgtagtttttagtgtgttagagtttctgtgtgcacacatatgtgcacacatatagtgggattgattctccccgtgttggtctcagggattaaattcaggctgtagacttggtggcaagtcctttacccactgagccatcttgtgggttctgcacatgctttggcacagacacacctagtgtctgtttctgcatctggaaaatgagggtggtcatgctccttttgggcagttgctatgactattcctaactatggatgcagagcttctgtgccccacaaagcaagtgtcttccttctccattttgctttaggaacagtgatggaaatatcaagtaacatagttgctgtactgactccatcctgtacggctgtagtgtcctaaggatgccccagtagtcattctgaacgtcaccaatgctaccttctatccctcctgtgcatctctggtcagtgtcctacctgcttttctaaggtttactttgttagcccaccctgactgcaatggtttgtgacatgctgtccatgcatgtgcatacttgcagtcacagcaaataaacacaagtcctcctgggtagctctggatttggataatcaaccactatgtagatgagttagagcctcactttaagaataacttgaggctactcattcattaaccgtcttttaagacttggtatgtagcaaccctgcagacacacgtgggacctgcacagagcatggcatagctctcttcttgcaaaccttacagcatgactgagcacagctctgtagaactgacacaagagtggggaattgttcccgaagggcaaaagtggcaaccactgattctgatctcgtagggaatttgtgtttgtttctggatgagggcagctggaagagagagtagacatggtatctttctttattgtaaatatttgcctttcatttcccacctgtgtgttttctgtgaagtctgcctccacactgcttaggagcaggcttgagattttcttaagatcagccaggcgaacctgttgtttctctcctttaactgtctttgggtctgaatttcagtggacatgatgaggattggtgtgagtgattctgcccttttctcagtgtggtgcaaaggagaggtaacttctctggtgcaaacatctccttgtagctgcttcagtagaaaaaggattcctttgggggctttaacattgttggtctccatcttcttctctggggtctccctcttcttctctgggggcagtggctgctccctctctctgcccaggcattttcttcattttatttaacttggaagcctcggcgcctcttaggtggtaaatgtagaaaatctaaacttcccattatttgtaattatatcctttgcaaacaaatgttggaaaagaaaccagtagaatactctcccagctttttccctcatacctgaaagctcctagaaaactggggaggtaggtttctgataaagatagaatcttgactgaaggaggcaggttgcttttatttttgcttttccaaattgtgaaagatttaaaatagcatttttgcctaaagaaaaatgtaaaatcaattacatttagaaaagggatagtaaattatctaaatggagaacatagaacatgtaaatccattttgccctgcagttactagggcgagtgaatgtcaccatgtgcggtgatgtacagtgttctgaggtcctgcagattctgatgccaaccgtgaggatggcatcgatggtgcatctgtgtttgctgatgctgttggcttacccgccaggtgtcattggaagatactgaaactcagcgagaggtggctgtagggtatgggactcagtaacaggtggttaggtgtcaggtatgccagccatctaagggaaagaggctgaactagtcatttgctcaagaagtctttgaaaagctagagctctgcagaagagctgtgttcagggaccccgtgtcctgcatgttgaagttccaagctcaggcattgattgattgattgattgattgactggacatctctctctctctctctctctctctctctctctctctctctctctctctctctcgctctctctctccccctccctccctcctccctccctccctccctcccttctccccctctctctatcagtcatctatccatcatctatctaaggcagagtccttccctgctggcctccagttctccctactgcagggttataagtatccactgatgccctcagagtctggattcttgacaccctttctttcctcttgtttgttagtgtctttccccaatactgatgtctgctgcgctggtgttctgagtggggctggtgagccagcatcagggagcctgtgggacgtacagagtcttaggtgccctcctacacctggcttttccctttggaaggtcctcagacagggcacataaacactgttgtagaggaacgctgctcctgcaggtgtgtgggtggacattgcacagagagaacactgaataagagacctgggtagctcaactggcaacttaacaaaacacagaactctaaggagaaaccaggcagtcttcacttagccttttagaggacagaaagagcaagcagaactttactgtgtgctaagtacaggtactggctgtggagagtgctacagggagctctgcatcccagctgtctaggccttgtccagttgagcagatcttgccgtctctgtcttaaaccttcctgtctcacctctcttgtctgtgcttagtcctggtgtagatgaacctaaccattcttttttgacatcatctgctacagtagcccttacctataagagaagcactctttttacatcacaggtcatcagctatgtcacctaggaagtcattccctgctccttggacacagtgctgctgttagcactgctggtaatgagtttattatttcattcatgtaaggacagggtgtcttgtgtagccctggttggcctcatcttcttggtaatcctcctgtgtcaacaccctgggtgctgggattacaggcgtgcactacctccctggatacaattgtaggttgttcctctcttgggttactagcctttgtcatcctagacgcttgactgcattgcttcgcagcttcctctgttagagagagaagaggacctggggtgtggatttcatccctgcagcctccttctcttaaattgtgtggatttcctttccttttgctgcccatagacaggcataggtctgtggagttacacatggtttacatgctgctacataaaaaaaagaaaaggcttttaagaacaagtgtttatttttgagtatttcatatgtgtgtacaatatattcattcctcacttctcccagatccactccccactttcattcccaccctcttccaattttgtgtcctcctttatggcccatgaagtccaagtgcactctccatgtcctcatgggcgtgggcccaggtgtgtgcccaggtcttccattttcttggtaatgcagcagggagtgtctgcatgtctgcatgtgtgcacgtgtgcacgtgtgcacgttttttatctgtgtgctgtggagtagaaagattgccagcggtaaggtggggagctgaggtctgtctaggatgccactgtctctctttgtgagggaagcaattccctatcccaagtttccctttactcaggagtgaaatgggtatttttagagcgcttcttatgagtaccacacagtgggggttggggttggggtaaagatgaagtcatacagcataaatcacatataggaagagacttcctataatagtgcccacatggaacactaataccatgatatacatttgtgtgcataaacatgcattctcctagattttaaactcttaaggaggcagcaatgcatccattttctgacatctactttagttcctaatgatgtggggtatcaaataacatttgttgaggcatctaagaggtccagatcttgtcatttggaaaagattattattgtccagtacaattgagatactttctcaagtcgagttatctctaaaacatacaagctgaggttaaggatgcctctgtcggtaaagcatgaggactctggatcccaacacccacataaagaattgagtatggcactgtatgcctgtaaccctagcacaggggactcgaggacgagacaccaggatccataaagccattcactgagctccaggtttagtgacagaccccaccccctagagtaagatggagagagaccgaagaaggcatccagtgttggcctctggcctccacatgcatgtacacacacacacacacacacacacacacacacacgcacgcacgcacgcacgcacgcacgcacgcacgcacgagcacacacacacagccttagccagatgtagtgcacctctgtaatcccaacatgtgggaggtagaggcatgaggacccagggttcgagatcaaccttggatacaaagcaaactcaaggccagccagcctgtgctgcatgagcccctgtctacaaaatctaaaccaaaccagatacctcacccgtcctccagcatcggccatcccagatggtctggattcaacctttgctctgtacacccaggacaaggaaacaagttggaggtgataagaatgctttttttggacagtttccccattaaaactgcccccagtgacctcaggcaccctccttgctggcttccctctgcttcctcctctcttttcctctgtgtttgctcagccaccacctcagctgctgctacagaccccactacccccaaacaaaacaaaacaaaacaaaacaaatgagggtgatcggggtgcagttcttcttcccaggagctctgtctggatgtgctcatctgcacaggggcataagtgtcccaagctgcatctcggtaattcccttagaatgctgagtggtttgccgttccctctctggtctaatctagtttgttgaaaggccttctgtcccgtgtaacaggctttatgtcccccgacattttactgtgaggagtaattacagaagtcctttctggacaaagtgccaactggaggtgtcatgagtgtttctcttctaatggcttagtttcctgcaggggtgtgtgtgtgtgtgcgggggagctaactggagtctggagttaatactgtttgtaactgtcacactcaagcagccttttctcaggcttactgatctcttctgtggctaatagactgtttcccacagcacagatactcaaatatttgaagaaaagttctttttctcgtaaatcatcccaacctttgttctaataattactggttatattgatggggtgtttatttttttcgccattgtttggtgatttttctggttgaactcaaatgtgcctaatcttcttaagacatggtatttaaggatctaagtgcttactttatgttgcaaagaaacactaaaggagtatagtttcaaggcaagaggatgccttatgcccttctgttccaagtgaatctgttaattacttttttttctttgtttccttcatctaaattacttttggtctgtgtggggttaactcaaggttgtagctgactctgcccacttactggatagatattttcatgctagctctaaaaacagtatctgctcattaacttttccttttaaaaacctgttttcagtgctgtgacttatttacttgggcttttgtcttgcttttttgttttgattttctttattttgattttttttattttacattacagacaaacagcaactttctccttttatcttcccttctctgatttatgataaatttagtttcctttggcctgacgtttgcttcagtaggcagtcttccttcaagtgcctccccgattgatgtgtaatctttgatatctcctattagcctccaggaccactaggttcaaggcccccttggaacctaaggagccccgccgaggagctgaaggccttcagagtccttggggtgattgacaaggtaattcttcagtgtctcttcaagagttcagtcataaatggactgcatgctgacattctgcctttgaagctgtggatcttaaggatatgaaacaaaaggggaaatgactcaaatgcatccgcactgtaaaataacagagcagcagggggagctgaaaccccggccactcgcataaggtcatgtggagcacgctgtgccaaggagaaggtgtgtatttgttggcattcacttgagtaaggggactttacttttccaaggtgtggtggtcggatgctgcagtttgtgccgcttacatttgtgagtctgaagctgttaaacaatcattttaacggtcataaagaaagatggaattcctggtagctgtcgtttatgagcacctactatgtgtccaccccatatcatgcatgcacacaaagctaggtgatgtgtcaatcatgtcaaatgtttatcaacactgagcctgtcaatttggaaatactagatcgttctaccgttataacattaaagaaaatgccacttaatgttgacacaaacgagtctggacccctccttgaccactcgtcattgtttctgaaaaaccttagtgttgttcgttttggttcatcggatgccacttggcttcggcagtgctcttatgggtccttgttgcactcgagcgatctgcggtgcagcctgggcaagtgctcacagtttgaagggttccagaaagagcatcaagtcataacctgcaccaagtaagcttcattgtctcagataaagcagcacagatgaagtctgaacctgaagaagtctatgcagtagggcctttggagttgtttcagtgtaatattctgtgacttcctgtggcctttgcattatggggagcgttctgtttgagagtagactgaaccagacagtaactgggtggattcaggtgctgggactttggtacagacacgccgtctcattcctgtcagacttgtttcttatgactctgtgagactgttgtttgtgctgtgagcctcaagtcacacgaagttctggaagttccgggagccccacagaggcagaccaccgctgtctgtctctatcagcccgcgtctctcaggcaggtgctgttttcttgagctctgtgtctgggaaccagtcacctcttcaggtagtcttagttcataacatcataactgctggtgaaatacaagcaggcagatcttaaagtttggattgttcaaggtaaattcatttctgttgtactgaggaataccttaaatttgagttttagaaacttgggatttgggagagaggtgttgaataaattcaggcctagaaaacacagagtacgacagggctgatctgggccagcagtttctctgattctgtctcattttagtgtctgctattgtgaattatcttaagttgtttattaacttagcaagttcagttttgtattaaacctcattaggaaataaagtttgtaaacctttatccagagagcaaatgaaacagtgttcttgttagtgtctacactgcggagctcacgagcacagtgctgtgctgttttacttctcaccgtgttccctgtgcctagaattatgtctagcacaccataggccctcaaagcagatgctgaatgagtgaagtgaagaatttaaaacatgtcacagagcgacacctactggtgtaacgtggggctgctccctagagccattctacaatgcgtatctccttatagccatggctgtttgttggcttagtgttccaatggaaggaagtgatcttctgtttcttagttgggattgttaaaccctttatgcaatagggagttggagcagttggactcttagagtatagacaaacaggcgcccattttgttgcagaagtgatcaggctggtgaagaccttcagagttctgtcacaggaagaccagatggagaaagcgagcattttcacctggtcaaataagtcatgtgtagacttcaggtattcgagggctggagctctgttatgcttgcttaaacctagagggcaagaggggtaccggttatgctgggacaacaagtgcatgctggcaccaggaaggacattggagctgcttgttagtgtccacttctttcctctcctcccaggaagtacctagaaccagagaagttcaagctgcagagagaaagagagaattggatgcatggttagaaatacctgttttcttccttagtttttcctctgtttctccttccttccttccttccttccttccttccttccttccttcctcttcctccttttcctcctcccctccccctcctcttcttctttttacctgaggcagggtttctctgtgtagccctgactgtcctggaactctctctgtagaccaggatggctttgaaccaggcagcttgcctttgtctcctgagagtaaatgtgtgcaccaccactgcccagctagaagagaatctttgaaggtttagtgtcttagccaaagctggaccagataggcaccttctgagcttcttgtcagaagaatggcagtggagggatgctgtggatgggtgaagcaaaaacctaccatattgggtaaagatgtgtcttcatcccaaactgtaataccacagtcagtgttaaatatgaggaacaggagcagcatgtggcctacacgccagctgccaggtctctgcatttgcagggaggccactgtgccttgtggttttgattgccaggggcagcccctgtgtcgcaggctcccggtctgtgcagggttctgtgttctctgtaaattatttagatctccactcagaaggtactggatgctttcttgagttgacagtttgggtttgaagccagatctgtctcgttctaaaattgtaacaaatcattgttagaactggattgttgtagtcatgacgtccacacttcctgtcaaccttttctattcattctcagtaaaatttcatacaagcaattatgcctaatgaacttcattcggtatgtgagagacatttttaaacctacagaagcagaaaatccccacagttaccaaaaggacttagtttattactaattgaatagctaagtcatgatctcatttatctttaatacctacagcacatgggaagtttacagattcctggtgcctccagactataccattttatagacaaaattattgtgtttgtacctattgattaacaattcaaaattcaccatgtacatgatttatgtttttgattacgaacatcattttttttttttttattcaatccagttgggaagtgttattctcagttatcctgatattttcaggttactctgcatacactgtaagccactcaactgtctccctgtcgcttgaccctagattgctttgttgtttgcctctgctggtgctgagtatgccaggggacagatcatctcctcctatgattttatttatttatttatttatttatttatttatttatttattatgcatacaacattctgcttccgtgtatatctgcacaccagaagagggcaccagatctcataacggatggttgtgagccaccatgtggttgctgggaattgaactcaggacctctggaagagcagtcggtgctcttaacctctgagccatctctccagccccctcctatgattttttaaaaaacttttttcagagttggaggtaggaggacaaaacggtgcacccgtgtgtccttcccctctcccaccggtaccagcctgtccacgtcagtgacctggggaacctgctgcctcctcccagcctgtatgataccctgttagtgacctgggggagctggctggctcacgtctcctccggtagcacctgccatttgctggattagaatgtggacctgaggttgctggcgaggctgtggatgtcagtccttgtggtacgcatcccttctgtttctgagatgctgatccgtatttaaaaaaagaggctatttatgttaattttatatgtatgactgctttacctacatgtatgtctgtgtaccatgagtgtgcctggtgtccacagaggtcagaagagggcatcagaacccttggcagtggagtcacagacgcctctgagctgctatgtgtttgctgggaactgaacccatttcttctgcagggcagccagcgctcttagctggggagccgtctctccaacccatgtgttgctttctttctgtctggtcctgtggtgttcagcaaatattgatcatatattaatatttgatgggggctctggtgcccacatgtcagctccctgtatcagagtgatgctgtctttccctctttgtctccatgatttgcctccagtgttgtgtgattagcttcttgttaatcatcaggagctttcccgctgtgcacctttgcagttcttacagcagaacaaaccattgttttctgtgttgataattctgagttatccctttgtaggcttgttaggagatgcaagatcacgccccatacacactgctgtgcggtgtggcgcgtgctgtgcggtgtatcgcgtgctgtgcactgtggcgcgtactgtgcactgtggcgcgtgctgtgcactgtggtgcgtgctgtgcactgtggcgcgtgctgtgcggtgtagtgcgtgcccgtctcttcccttttcttcctacgtgctctcttctcacctctaactcctgcttcccagttttccttgccttcctctccatttttacccatttctcttttgcttgtgctctttcatgccttaattcatgttgcagaattgtttcaacctatgcactagtcttatttatttttcattttaaaaacatagccttggctgtcctggaactcactatgtagacgaggctagccttggactcagacttccatctaactctgcctccacagtgccggctttaaaggcatacaccacatacctggctgtttgtggttttgataaggagactcacacaactcgagctggtctggaattcactatgtagccccacgttggcctgaactcaaggccttccttcatcagtctctcaagtgtgggctgtaggcaggagacatcctgcccagctctgcacagttgattttgatgttttctgtgtctcttccgacaagccttagattcttcaaatggccaagtgtacttgctgagtaattttgtaggcaacaggaagagacaacaaatgagctagacgacttcaaacgttgttgaggctgtgtacacctgcagcatccgtcacagcgcccacagagcacacctgtgggttgttggcaggcgctatgttgccatcaacgcaatcgccagtttgacaatgagtgtcattgccttcgtgttttgtaagggctttaaactgttgggaggacagtgtgcattctcacactcactaagtacacttcctgcatcgtatcaaaatgttacattttagccagtaccaaactttggcttcatcttctataaaaatataaactcattaaaaaattttgctgggtgttggtggcgcccacctttaatcccagcacttgggaggcagaggcaggtggatctctgtgagttccaggccagcctggtctacaagagcgagtgccaggataggctccaaagctacacagagaaaccctgtcttgaaaaacaaaacaaaacaaaacaaacaacaaaaaaatttaaaatagttttttaaaacttccttacttttgaggcatttgactttggaaagggagtcattgggtcacaggcagggagtcgctgcccattatcattgtgagggagcgtctgactggcccgtgctagccatttctcaccagtgtatagtagatggctgcttttggagctcattctagcttctgggcattgcaccctgactcagtgtctatggagggcatgggcagggcaatcctatgtagttagttacctgaagggaattaggttttctcagcagatgcagacaaatctccaaagtgaaacataacagtggactgtgtttttagagggattggtttctacctgcacttaacgaagtcaagccaccatctccaggaagcttcaggattcaaactgtagaaactggttgataactcaggatggaattaaacggccctgcctgaacttgggcctgtggacccagtgcttttagtgttcgccgtctctttagccatccctttatggccttgggtaggttcttcacagaaacataaagcatctccctcgctctttaactgtccggtgaagccgttctctgccctttataccctgcctctgctgtccttatgtgaggtttcctgatgacacaccatgtcctctggaagccggtgctgtgcagtagttaagtgtgcaggcctaggatttgaagaatcacacaaaagttatctctgtgatggggtattgttcacaaggtattagagggactgctgaggagcagctgttgatacctgggagtcaaaccggtgtttggccttgagatagttactgcctgggttatttactggagaataacccacattttgccttgttttagggtgtgaggcatttagttatttgccccagagttggggatttggccaaatgacttatgaacaaagaaaaaaaatatataaatgccatttttaagaatagttttaattgacagcaaaagtgagattaagtggaaagcttctcctatagtcatggccacacacacacacacacacacacacacacacacacacacacacacacacacacacacctgttctgagttgattgatctagatgtcatccaaagagctagctcaggggaatgcaagacttgatagccttggcattgtctctacccacctcccacccccagtacagagagcagactaggagaaaagcccaacactgtgagtctcagagacccaggatagattgactgcctctgtgtctccttagctaaggggctagcggccagtatccagggatggacactcctgcctgcatatccttctcttgggtcctctatactaaaagtcccaccacctcctgacagcaccttgagctgcttctaacaagctggcctttgggaagtgttcgaagtccagaccaccacatacatctttataacaaactgccaaggctcagccagtcacagcagcctagctccagtcagttgtaggaggccagctgaacagaccatgttccaactaggcaaagcctgcactgtgaaaccatctgagcggttctgccctgctttttcattctgtcacctatgccacctgacggcactatcagaacctcttctggctcccaagctgcttgatctattgtatttaaaaaaattatgtatatatctgtgtgtctgtgtgggtacctgcattcgagtgcagggcctgcagaggctggaaaaggcatggggccccctggagctggagttacaggtgatcatgggaacccagttcagatcttttggaagaatagcaagtacttttaacagctgagccatgtctccagcccctgaaaaattatatttttaatatcttctcattcatatttaggttcatctttattgctgactacagtgtatgcctttgtacagatgaatattggcttgtgcctacaccactatggtgtcattcagggtgtcttcactgtcctgaccctctggccatccctccaccctttgccctgaattgtggcactgctggttcttttccagagtacctcagtgggactcacagtgtgcagctctttcaatctgccttcctttacttgatgacgtttatggaagtttgctcatctcttcttggcccgctctcaccaatcttactggaatacactgcactctgtttgtcctctaggccccagggacgacttggttgtttctgcgttcctgtggttatgaagaaagctgctggcccttccttgggcattttctgtgtgggcacgttttccgtgccattggcagatggcaggagcatcatggaaagggaagatgtggttctgtaagaaactgctcagctgtcttccaaaggagccccgcattccccccagctgcacagcaaagtcccatgctctgtgtcctcttcagcctttggtgtcaaacccaggcctcttgcatgctccaccccagagagaattttaattgacatacaatgattgtacatgtggggtacagtgtagtgtttcaggacatccccgccgatgtgtgccatgtgcagtgagcagggtagttggtataccccgcctgccctgaagggtttagttcttgttgctgagccttatccaactttatcaactgttctgagctgtataactgtttgttgtcagccttacccatgtccagtctctgagccctgctctacaggtcacttttacaaggtcgtttgctttcggcctctgaagtaagtgagaacacacagtttctgtctttatatgtttggctggcttcacggtggcaggccccagcttcactcctgccttgctcactttaaagccaggcttctgctttttatttctgagtttgaagaagctgtgtgtgttgctatcgggctgtgggctgtgtccttgcagagcagagcttttaaatgttcacaacgtccacttattttttccatactttgtcagctggttttgtgtcagattgatacaagctagagtcacaggaaaggagggagccttagtagaaaaaaattcctcaaactggtggtgcacgcctttaatcccagcactcgggaggctgaggcaggtggatctctgtgagttcgaggccagcctcgtctccagagcaagttccaggacagcctccaaagctacacagagaaaccctgtcttgaaaaacaaacaaaccaaaacaaaaatagcaaaacaaaagatctgcttccaggcaagcctacagtgcattttctggcctcctcggcaccacacatgcatacatacctacaggcaaaacacccttatacaaaatgcagaataagattggaaataacacaaactgagtcactaattaccattgagactgatttagaagatggttttggtgtcattttttatttatttatctagctatctatttacttatttattgtggcaaggtcgtaccatgtagccctaactatcccagaactcactctgtagaccagactggccttgaacttatcaagatccacctgcctctgcttcctgagtgctgtgattctaatttttttgcttttggtaaattttttttctaaaaattatttttgtgtatttttctatggttaaaaaataaaaaataaaattttatattgcgtttatgttaaggtgaatacatttttgagattcagtgttacagctgagcaaacactacagtgttgtgtgctatgtatgacggctaaatgaggcatcccttaagtagatgatgtctgcctgtctgtctcccgtttctctctctccctccctccctccctccctccctccctccctccctccctccctccctctctctcctccctcctttctctttttcttttcgtttttctttctgtgagtctatattggccttgaatttgcagtctacctgccttagcttcctagtctgtgttccaagcaccaagatacctttattccaatattgcgacgttatgattcttcacgaagacaagtcactctggaagcatttgctttatttttagtcatttattataattaatagtgataattcctaaaaaaaaatcatgtcgatggtgaagtgcctaaatagtcacaggtaagaattggtccactggggcgtgcacacccagtacgacattgtcacaggcatgcgtgcacacccagtatgacattgtcacaggcatgcgtgcacacccagtacgacattgtcacaggcatgcgtgcacacccagtatgacattgtcacaggcatgcgtgcacacccagtacgacattgtcacaggcatgcgtgcacacccagtatgacattgtcacaggcatgcgtgcacacccagtatgacattgtcacaggcatgcgtgcacacccagtatgacattgtcacaggcatgcgtgcacactcaggacagcgcgtgccaccgtgcctggaaaggcgccttcagtctgcacacatcaggttgtatatttggtattttgttaaacttgttcagagtgtgctttccttggaaccctttggacttgaagtacccgggagagaagcccttcccagcatgcacggcttgggtctgtgtaaaccgtttgcttttattgttattattcatagaccggacaaacaacttaagtcttatatttcagctttctcagaacaggcttattttgaataaggttggtttttcagtatgatcagccttcttttaaaaagaaaagccatcacatcccctcggcagttctgtttgtcttgcccttggtttggctggtggaatgactgtgaccttggatgattttctgtgtgtagctgcttcctcccagtgttcagtgttttctggtagcttgcccgttgcctgcctctggcttcatcatctcccttatgctgacttaggcagtatttcttcagtctcttatctctgggctttgatgcatatgttctgaaggtggccaccgtgactttgggtagcagcagatggtaaaccttcaggccgccaccagctatactggtgctaagttggggagttcacgtttgatgaagaaacagaagtgcatatgaaagctttcactgcctaaataccttctaattaaaaaattagcatacgaaaacctttgcagctgcctgtgcatttgaagaaaatgacaattagttgttttcttagaaatgcagttatttaccagtttagtttctcactgcttgtgcttccgaacagctctttctcttttgtccctgtttgaatttggcagtagttgaggcagctagctaggtgattaggtagactgaaatagggggccttttagaagtcacagatgtttgtacactttaaattaaggtacttggaattttacttgctaaaatatgtagctcttgagtgctaacttccaacagttctggtagatttgatctactgttttctgccgtggaatatacttctggattaaatacctgcttgaagaactcaacctgccccaaggccactctgctttgtctgatggagcaggtgacttgtgactgctgtccacaggcagggctccgtgggttatgtgttcacttcctagtgatgtgtcaggctggaagaaagttctagcacacagaaaagaaataaatttaaaaatattgtgagtaaatcctagaagcctgatgcatttgctactgaaacagcttcttgagagtaggaggcaagaatgtcttggagttagttgagtattcaggtcacatgtacttttcagacttccattctcttcagagaactcgtgggaagccaaaggcaaatggcatcgtgttcttggggtgtaggctcctgcactgaaactccctgctgagcgcagtggctcatctcttggtttcatcattgtggacagtatgctagacacatcatggcttggccctgtggcgcttgtgacagagacttagagggttggtgtcaaaggagcccagtacctgcccttttctctggtagttgaagtgttataagtgatggtttgtgagagtaggcatggggccaagagccaatgttttgtaagaatgcaaagtgaggtgggcttagatagaatatggagagcatgtggtcaccatcatgtcaccgaggccatcgaagtgatgaggtttgctgtgcacagccaattctgcagaaggctggtgctttaatgtcccaataacatcccaacaaaaatcacttaagaatttgcttacttgtagtctagtccagtgtggcctattttcaaaagagactgtatcaggcagcacagtctttctcacccaaactatgaggtaactggtgtgtaagttttctgtaggtcgtttattgttctctcttcctttctgaggatgttgtgtgtgtgtgtgtgtgtgtgtgtgtgtgtgtgtggtgggtgggtgaagagagctagaggagggtgttccagaggtgtaacttgaagaatgcttactcaaatcttaccccgtgaacgatgtaagtggcttggtgataccagtcagggcagggctgtgtttgttcaatgtgactctcctaaggctgtctttttttttttttttgtttgagacagggtttctctgtggctttggaggccagccctaaggctgtcttaaacatagagtcctacaaattaccaccaaaatggtggtcctactttgagagctcatatcaccctttcactgtgtgtgtgtgtgtgtgtagatctgttttcttctcttcagatttagtcttcttcatatcattaaaatcatctggtgcctgtcttttcagagttgtggttatctagcaggtcttccgtactctggcttacagagctgcaggcctgtaaccacatgggactttccttctgttatggaggaagagtgggcaagggtcctggtgccactgaagcacagaagaggttagtccatagcctaagtgtctctcccccccccccccccgtgtcccctcccccatcattgtttgtattactgtgggcagagatggagtagccctttccgttaggccatatgttaatatagtgctgatatatgagtggggaaaatgaaagagagatacgctaatggtgttctttcaggaagatatgtcgtccaagctaattatttcatgacagtgttagtaatagtacaggttttatcatgaaataaaagatggttttaggagccttttattggaaagacaattgtatcaaattagtacaaattagatttttgtctttacaaaggtgagcaaacccatgagcagtttttaaattgcgtttgagtctacaaatgaacaaatccagtttgagggttaaagacgctgtaattttgtcctttatgctgacagcttcattacagattggccactgttggcattaaaaacatgcccggctccttatgatctccacccgcccgagtacgctgctatgatattgatgccataccaccgttcattaaggactcgacttcaatgaggctgcagcgagtaaacgtgaggagatacagatgttaaatgcagccgtttctctttgtgtacagccgtatggctaataatttccaagtggctaaagctcttgttagcaggagtgctggggtgttaggaatggagctataaataactttaagaatggaagttgaaggtgtttcctttaaagactcctgttaactaaacattatcgccaaacagatggagagcactcaccagcctgatgtttttaggtctaattatattatcaccagccctgtatggctcagttgaagaggtgtacccagaggccaatttataatcatttaggcaacacctgtttgggagaaattgacagtcaaagggcacatttaaaaaaaaaaaatcacatatgttcttgtgtttgttacctcaatgtgaacgttgtcaagttgcaaataaagttggtaggggaaggaaggaagcctgcacgaacccgctgcttaccaggcgcgtttgtctgtcttaatttgtccttctgtgggacctgcttcctgacagagcgagactagcaaagaggggacccccccccattcctgcaggtgcattctgttctgttaggcaggcggcttcagctaagaaaataaagttctctggccttactgttcacccagagagatgtctcccaccccatgctaatgtggctttggaaacacgattggctctctagggagtgacgtagagttgtaagttgatgtaaaaccagatgagatgctaggagtgcagatgcctccacagagagcacccacagctgtccgtcaccttccacagggaggggacaactgtgagattcaccttcaggatcaagggctatgaatttatttccattccttggagagtcatttttttttcgggagaatgtgttggtagcccgcaggcaggcagttaagaaaggacaggtctctcatgtgtaagaatgaaagcccaaacctctgtttgaactcagggcccactgtcccctgtctttcagtgtcttctcctggtgttctccgctcctgaaagggtcagatctatcaccgtaagggtcagatctatcaccccgttttctttcatctgattgactcggagccacctggcttctgtcttgctcagtctatgacagtgacctgtgacttcctgatgccttccccagtacatcttttctcagtccttcaccatagctcctgtttagtggatggatggctaccccgaacccccccccccttatagttctgtctcacatctgagtactctttccttgtagcactatttatttatttatttatttatttatttatttatttatgctgctttcatacctatttatagtatgccaagtgtgtccagctttctaaattctgatgtaaacagtatattgtctgcacatgtgcagggcagggggggacattgggagctcactgtcccagtacagagttccccttcttcgcttggtagctgttttgaccagggtcagtcagttaattttttttttttaatttgaggtatttgcacattttgttttattgctatgtctctaactctgggaagtcagttcatattttacacttgttttctcaccttcaaaatttgttgattagaaatgcacacttgtttgggatgttgagggatatgggatgcccttctgtatgctgtgaatatgtgttgcttttattgcttgatgaataaagctgttttgacccatggccaggcaaaatatacctaggtaggaaatccaaacaaagatgctgagagaaggaaggcagagctgaagagatgccatgtagccgctgaaggagtaacatgaaggcacattactggtgagccacagcctcgtggcaatatccagattaatagaaaatgggttcatttgtaagagagagccagccagtaataggtctgagccattggccaaacaattatagtttaatgttagcctcagagtggtatttcataagcagattcagggacccagtgggcaggagagaaactggtctaatgggagtgggtgagagggaggaaaacacccaactacagttgagaatgtcccataattgaactctccaaagcctggtgttgtgcatgattcgaacaaccaatggggttgttctcatgccttgaggttgtgtcattgtgaggaatgctcaaatataaatctttggtccttcttttccaagttccattcccaccttgctatccaccttctgtattcttagacttgaacctgctagctgtgtgcttatggatttcctatgtcaaaacagaaacaccatttctaccctattgccacatagccaatcatggcaggcttagctgtctgagcacactcaacatactgtgttaaagctgtgtacgtcataggcatgacacaggcctgctggggctggcgacactgctctccttgctgtggtctgtggaggacctctctcgcatgcacacacgctaacgggctctgtggttgttggaatgaactttctccttgctgctggtcagtggagggcttctaaactttgcctgctcctctcagactttctctgagcttctaaatgtgtccctttggttcttgcctatgtgggtggctctccatcttagccaggtagaccctctcatgatagaaaggccccctttaccacaacactctgtgcttcccattcttctggccaggatttagtcttcacttttagaagttcatgtgattcaacagaacccactcagacaacccaagtgatgtgtcagctctgaatcaattacatctgtgaggccctttctaccatagcacagtccactcacagagtctggagaggggatgatcacttctgagaactatgacactgtctgtgacataagaagcttgacatctggttgggagatgacaaataaacaaattgaagagagtttgagaggccataaaagaagttagtgccatataaaatgggatgacaaaggagagccattggtgtgtgtgtgtgtgtgtgtgtgtgtgtgtgtgtgtgtgtgtgacagagagagtgtgtgtgacagagtgtgtgtgtgtgtgtatgtgtgagagagagagtgagtgtgtgtgtgtgtgtgagtgtgtgtgtgtgtgtgtgacagagagtgtgtgtgacagagtgtgtgtgacagagagagtgtgtgtgacagagtgtgtgtgtgtgtatgtgtgagagagagagtgagtgtgtgtgtgtgtgtgtcagagagagtgtgtgtgacagagagtgtgtgtgtgacagagtgtgtgtgacagagagagtgtgtgtgacagagtgtgtgtgacagagagagtgtgtgtatgtgtgtgtgagagagagtgagtgtgacagagtgtgtgtgacagagagagtgtgtgtgacagagtgtgtgtgtgtatgtgtgagagagagtgtgtgtgtgtgagagagagagtgagtgtgtgtgtgagtgtgtgtgacagagtgtgtgtgacagagagagtgtgtgacagagtgtgtgtgtatgtgtgtgagagagagtgagtgtgtgtgagtgtgtgtgtgtgacagagtgagtgtgtgtgacagtgtgtgtgtgtgtgagagagagagagtgagtgtgtgtgtgtgagagagagtgagtgtgtgtgtgtgagtgtgtgtgtgtgtgacagagagagtatgtgtgagagagagtgagtgagtgtgtgtgacagagagtgtgtgtgttgtgtgtgtgagagagagtgtgtgtgtgtgtgtgtgtgtgagagagagagagagagagagagagagagagagagagagagagagagagagtttcgagctgtggagagaggaaagagaccctggatgtacttttgtgagatcaccacagagagattctcgtatatggtggctaccgttatcttctttcatcatagcgtcacacgcagagccatagtgtcagcgatgtgtggaataggaatggttgttgagaggattaacattggttacccgtgactgacatagcaaatgcttaaaatgaggtaggtgaaggaagtgggtgcagttggcttgttggcttggctgacgatgctgtagttggagcttgggtttgggaactctgcagggtatctgggaggtgtctgtgtgaataacattccattgtgacacaggacacaggttgatttaaatagtgcatctcaggctcccaggagacgccacccggagaagatgtcagcaacattcttatgtctgtgtctgagatgggactgcctccaacatcgccttcccacccgcagctccggtctcctccccttctgtgtctccatgctgagcaggccacctttgcctgcggtccctcctctaagtgggggttgctggtttctgccagcaagctttctgaggggaaaagtcacatttgcagtgttcattgatttctgtggtataaattctcaccaatgtgaggctgtggttgtttgctggctaagacagtgcatttgaaaggtggcaggagacacttaggggtctgcaaagccttgaatatttgctaactggactttgtggcctaatctctgccatagttttagcaaaaataaaccacatgattgtggttggagttgtccttatggccttcacccagggtggcggcagggatggctggccattcaaggtggcagtgtgtgagatggtccagagccatcccgttggactgcactcacgaaagaacgcccggtacatgaggaccacaaagctgtgcagagcagaggggagcaggatttctgtcgggaagcctttgctgccagctgggcagagatggtccctggttgggtcgggggcattagtgggaaggggtggggcaggacagaggttgaggatagagtcagcaggatttgctgacttggaaaagaagaggtaagctctggtcctgagtgtagaagcagtacccaaaggatgcccgagatggcactaaagtctcagttaccgagatcgtgttatagagattttagaagaaagttggaactccatcaattttagtaaattatgtcctattagccatgtgagaaaattctttgactgtccactccccacccccactaccatcttgatttggggtttccctgcctctgaggctgggcctagaattgccaggccagctttgttctcaccacccttctgccaccagtttccagttgtaccagccacttgtgcctcatgcctggcgatggcttgtacttttaagaaagacattttaaaaataaatccaggaagcacagtgatgtttctatgctgtggtgtttttaagaaaggaaactgtagtggaatctattttggacaaggctgtttgggtcctatgagttaagatttttaaaatgtctatccagaagttagaatttggcaagaattggaaccctaccctaactcttagtttctcaaattaaagagttaatgttttattatatttgttaattgcttgtgtctgttgtataggttttacttgtaatggacacaaggacagaacagaccttcattttaaaagtaagtaaaatttggatgtgtagtgaatttaaaaaatgactttcaaaaatgtaaacatgcttttggaagaaaaagtaatatttttgcatggtatctgagtatctgagtgttttatgttcctggtgatctatatttctgtcttgcacagttgacaaacatgctatagcttctatgtagaaagttgtatgttaaatagtgtgtaattggaatgcaccggagagccaagagccttcaggtgtgtccgttgtgattcatgagggtcacactgggtctggcttgggtcctggcttgctccttggtgagaattcagtaataattaaacgaataacttcagttttgaagttgtttttgtgatggattatcatatgtattctaaatatgtcctgattgaacattcccatgacacccaaaagcaaagatgcttgtcttgggcatcccctttctcttgctggtccagcatgactggtgtggagcctgcctctttgtgaacattccatgccaccacacccagtggtgtttaaccatgtttaaaaccagggtgtaacaccaggaaatgtgtaagtcccgtccttttggaggttagtcggtagtgttttgcaattgaatttaaaagttgctgcttcatctagagcatgtctggtgtctggagaatgtgactcaaactggttgctgccttaaagttgtacataaggaaaatcaaacttagaggtcgcagagaaatcattgtatgtcatcctgatgacttagtttgagagcatcgctaataaaaacactgacccacgtaattgattttaatggcagctttgtggcatcttctgttgtctggattcatgccagatgccatcagcagagcctccggggactgaggggcacagagcagcagatgagtggtttctctgaagcccgagtaactcggatagattagcgtggttgataaacactgagcacagcaggctccaaaggcaactgcgggtacaactgacctttttgttctctgtcagggtctgaggaagagcagtgagtacagcaggagcaggaagaccgtcatcccccgctgtgtgccccacatggtgtgtctacacaagtacatcatctcggaggagtccgtgtttctcgtgctgcagcgtgccgaaggtgggtgggtcagtctgactgtggccgagtgcaggcatcacctgccttgtgttccagtatctgcgatgatgcttggccggtgtcatttcataagcacagagatgggggacctgtctcaccactcttgctcacccgtgtcatttcataaacactgagatgggggacctgtctccccactcctgctcaccctccttactatgaattttgagggaagatgagaacccaggtgaccagccagctgcacctgaactgtgggacaatcctaatgtgtgcactttgctctggaattagctgacatgatgagaactttaatgtgaatgcatgccgagagagctgggttttatttagagatttaattctgttctcttgtctgctctgaaaagccacacttacgttagatgactaaaaaagcatcccctgcagaattaattaattgcttcctttacaggaaggcaagggtgtttgcttaacatttgacattgcctcgtttttctgatctgagcctcatgcacacagccatgggcgcctcacgtgagtacaaagcagaggcgtgggctctgccttcagccacttcctagggaacaggtggcagaaggcactgtgctggtttggtttttcctgttcatacctgagtttaaataaatattctcttatttatgtgaccacagcatgtaaatataaatccacatagcatatattgccttttggtgtctaaatagacattcttaaaataatgaagaaaacttaaattatttcccacatttcacgaaggtgtccttacttttatatatagaatacaatactttattttactaataggcacaacatttgaatataatacctttttctcggggaaaaggaggccctgctttctggaatgaggtctctcgtggtaactaaggcagggtttttgatgggggtaataaagtactaatgctgttgttatgaagtccacacaaggtaactacagatggagggaagactccacatgcagtgtttaataggaaattcagagggctccatggtctcacaggtattacgagagttaattgcgtgtgtgaattggataactaattcacctttgttcagacattatagacagcttttatctgaggataccagtacattacagacattattgaattagaggtcacgccatctgatagcaaaatacagccacctctggtgtggaacaaaataacttgcgtagtaataatccataataatttagaacaaggtcagtaggatgaatgtaattatggtcaatattctattacccagtgtggattattcatgttgcagattatctgtggcaaagcttcgaccctcgcttacctccactgcttgtagcttgccttcctcctcctcctgactccccgctacactgctttccttctgccatcttccctcctgcctctcacaactgagactgtcgctgatgtccagggttagtgcactgaccaggtcttctcttggaagtcgtttcaaccacgtctttggtgttggctgcaggtgaccaaatggaaacaagatgggagactgtcatggacttgtaaacccagaaggagtgtctctcctttcaaacgtctgtggcttacttttctacaagcctttaccatgttaagtaagttggtgcaggtagtaatggtcaattcatttgctgttagcagattgattgggtgtgtgcctcatggtgagctgtgtttccagtgaacaaagcatggcaagagctgccctttcaaaaattaagttgctgctggggagtcaaataggagaaaacaaaaacacagtaaagtactggatatgagttgggcccgccactctgatcctaaacacagggtgacccacacagtgggtcacaatgaagggaccgctcatgtgctcaaagagccctctctgaaatggggacaattaaaaaagagtcctgagtcacaaaaaccctgccattgcctgcaaagtccaagcacagggacggtgtgacacagggtatttgatgcacgaggacgtagactgtggctgaggttgtggttgtaggtgaaggactgagggctgtggagaagtgtgcggagtctgatgatcctacagagatctggctcacactccatgaggtcactcactagccagttgtctcagaagcaggagagagtcactcctgatgccagtccaggtgacacagggagacctgatttcaaacaaacaaaaccaaaaaggtcactccttattgtgtggtggtagtgtcatagtttgctttctgttgctgtgatgaaagcaacttggagaagaaaagggtttgtttggtttacatgttctatttacagtccgtcatggagggatgtcagggcgagaactgggggcagggacttggagacaggagctgacgcagaggctatggagggagctgcttactggcttgcttccaattggcttgctcagcctgctttcttagagaacccgggaccacagcccaggggtggcaccgcccacaatgggccagaccctccccctcaatcatcaatcaagcaagtgccccccagagtggcctacgtctcaatcgtctcaatccgatagaggcaattgctcatttgaccatcctttgcccttgatgtgtcagggcttaggccaagctgacaaacactggcctgtgccgacgggctgagggagctaagagcagagccagggctgatgcagagtccgggcaaaagacgactgtgtggtcttcgtggacctgcggacctgtgcacttcccaagcctcaagcagtggagagaactggttgatagctttgtgtattttgcccactgtgggcctttttgtggtgcctccatggacggagatgggatgacaatcccacatggtggaaggaatgagccgactaccacccacgtggcatcccccaccctgaaaaaattgtaaaaaggtcactttgacagtgtcatagctctgctgaacttagagtagttagggctcacatatttggctgcccggaacttacagaactagctaggacgtgtagtcagtccccactctctgtttctacttcattcagctagaggctttttgagagttttctgggacatagatgtagttctaacccagcaacgaagaagagtttgcctgtgtggcgcccatacggtattttagatgggggcagatagtgaacacacaagtagagaaggtatttggatagagagaagcgggcggggagaccgtcaagggatggatgggagagctgttctcaagtgcgggtggagcggggtggggcggccactgtaccaagacaggagcatttgacgagagggaagaacagtgtttgtttgtggggacaatgccttggcaagagaaaacaagaacataagcccggagccaggagtgtgcttggtgggtaagcagcagccggggaggactgctgagcagagtggagctggggaagtgagaggagcggaagctggaaacagggccacggtgtcttgaggaccaccttcactgttcggagaacctgactgaacaagaggagccgtcactggggatgctggcgagaggaatggtaacataagggccactgtggctacttggtggaaaatggaagcgtgttgaccaaatacaaaaagaggcatgagaagagcttggggtttgcagcaagctaggcagaatgatggtgcccattctctgttgctctgaacagacaccttagcaagaaagtatgttcagggccatgggactagagtcctcttggtccttgtgacctcctggtgacaggcagcacagtgctggacacacagtgcagacaaggtgggagggtgagacctgaggccagggcaagcacggggtcctgtgagaactacagtaattcctgccctaggggtgagacccagagacccagtggcctcctgttggtaccactctcaaaggtctccatctctttgcagccccacactaggaccaaagttatagctgtgatctgtggtaggcacactttggccatgagcagagccttcctgttagagatgatgttcagtcctggctctagaaacagaccatctccttccttctatgacccaggctgtctttgaacttgtgagtcccctgcctcagctccacagtgctgagataacaggcctgagccaccgtgcccattatttctgtttttgtgttttaatgtaaactggtcttacatgttgcttctggtctgcttgtcatcttagtgatgtatattagacacctttctgagctcttacagagctgtgctattaaaggttatgcacactgtgtggtggcacacacctgtcatcccagcctcgagaggcaagttcaaggcagcctggctaggtagaatgtgcagtgagactgactgacttctctctctctctctctctctctctctctctctctctctctctctctctctcattctctgtgtgtagtgatgcccatactcccagcatttagaaggttgaggcaggaggatcataacaagtttaaagccagtctagaacacagagccaggaccaggcagtgtgagtgtgagtgctgtctcgttcatcattgctggttctgtggcttggggcacatggcttagcctttctgtgtctcagtttctttgtttgcaaaatagagacatagtgactgtgcactcagtaggacccacagaagattaaactgcttacatgcgtacatcacttagggtggcaggcatgcggcgagcatgcatggctgcagaatggttctgcacatttcccatgatgcaactctttccttcttgctttgtgagctgttctatcacttgcatgtatgtatctttgcatttttattttgttttgatttttttaaaagaattatttgtagggcagatatcttgaagtgggaatttccaggccaaaggtgacttttcccattgcaataggaataatatctatgttaaatccaagttctaattctgttaaggcaaatccatagatttactgtgcgttcttgtaggacaccaataaattaaaatgagagacagagggatttaattaaactttatgaattgccattttgtagctgaagatgattcaataactacaatttcctatgcttcaaaggggcctagagagtatcaggtatattcttgatgtgctagaatgatcaatattttgtgtattccctgttcatatttgagatttaatgaacaacagttgtttaggttaatgttgtggtcataataatattgatgtttgggcatgtaagttgtttggtagggttggttttggttctgaagaaagtagaacacactcagtgtttaggaatgacgtgttctggctttgggattcatggtgatcagtgcaggagaggatgtgttctttaccaggctctgcaccgagctctgctccacactgaatgctacgttgcactggccccagagtgaagctggattagcccagacagcctcttctcctcctcatgttagagaacttgtgtgagcccagaaggttccacaaagaaagcaccaacaatcacatttaagattggattgttaccccatagtgaaaacaatggaaattaaacaggttggcacgatggttaataaaatggctaattgctaatgtctggcacaggccccttgctgaaggggatgctgtgtcttccattgcattcagggggcgggggcgggggcaggggtggggattctgcctgagcactgtagcagcccacacacgaaccttagaaagacccatgctccccagccagctgccaggtgcatgatggtgatgatctcagggcctgtgcaccagctagaggcaggggatcgaaattcagggccttctcttacacctgccagttccaggccaggccaacctggactacaggagccctttctccttcttgactgagccctgtcacttctggggtcctgtcttgaccatgtatttagagatggcaggtggtttattattttaaataattcttacagtaaaagacttgagactatacaaatatccactaacaaaggtgtgtttagctgtgcggccatgctgcacaatcatttaaactcattttctcatgaaaatgtttatggcaccatgttaattatgattaaaggcttgaaaataaaggaatgggaatagttagtagagtttgtctttggtggtaagatcagagatggtgttggggggttttgtgcctcctgtttttcttatcccctttggcatttgctaagaatgttgtggtaaatccacatataagttataaaataggaagagcatgtgacccctgcacataatacagacattttcaccaaaagcgtttgaaaaccattatacagatgtcatgtatgtatatctgtttagtaaatatttattaaatgtgttttgcatgctagttctgaaaggagacagtggaaatgtaatagtgtaacgtaagagtagaagtaacatgacgtagaatgttggttatggtgtaagagggaagtattagtgtgtgggttcagagaaagcatgaatcatgcctgttgaagtggttcaaagaagttggttaaaaaataataagttctgaaggacctttaaggataatgtcttagtcacaggttgattgctgtaaagagacaccatgcccatggcaactcatcttttataaaggaaaacatttaactgggggctggcttacagtttgagaggtagtccattgccattgtggtggtgaacatggtgtcatgcatggtgctgtaacagcagctgagagttacatcctgctccacaggcagctcagaaggagggagggagagggagagatagagagacagacagacagacggacagagagagataaatccatggcctactgtgggcttatgaaacttcaaagcccccgcagtgacacacttcttccaacaaggccacacctcttgatccttctaatccttctcaaacagttccaccacttggtgactaaacattaagatctatagcctatgggggccactcttattcaaaccaccacactctacttcctggaccccaccagaggtttgtagccatatcaccttgcaaaaatgcattctgtccaaggtcaaaagtctccatagtctatcagggtctcaacattgtaaactccaaagtctcttttgtggctcatgaaatctcttatctgtaatctgctgtaaaatcaaaataaaaaagcagatcacatacttctaacatacaatggcaccaagtatatattgtcgttccaaagggaggaaagggggcgcagtgaggggatactggactaagccagacctaaaaccatcagggccaactccaaactctgcatccccatgtctgatgctgccatgctcttcagatccccaactcctcccagctttgttgactgcagctcacttctctctgtctgggctggttccacacctggtctgctgccttcttgacaggtttcccttggctctggcatcttcaacatcttggggtctccaaggcaatccaggtttcaccttcacagcctcacacagtcgttacagttgtcacaagactgcagcaatcagttgaaagtcaaggtggatcccttaaatgttagtgtgtccacggggaactctgaagccctgaacatacaggagatgtgaagggccacacgctgtctgcactgtcaccaacgtgggagaaacttactgcagggtcacacacacacacacacacacacacacatacacacacacacacacacacacacacagagagagagagagagagagagagagagagagagagagagagaggactgtgacagtcacagtctatattgttcttcaatttaggagcagggcaaggtgatttgtggctttcttgaagtccttgaagtgagttgtgaagtagaaacttcttggacgggtttgaggactttatacctgtgatcatttggtcgcaattatttgttttgatcaagttcacttggtatatgatgcctgttattgttttgtttaaaaagaagaaaagagaagtgctgagacatgagacatgttgactataagtttattataagcccggcagaatgggagactaagaggaggaacagggtaacactgactgccatggttggtcgccatacagagacagggagagcttgtagacagagaagagaagaaacagagagtgggaaagaagagaatgaaagcagagttagctggagctttacagggaagattgcgcatgcgcactgaggttccatgcatgcccagagcagagtcctcatgggtgacgtttacttacgacgacgcatgccctgacttgtcagggggcagggtctgtctcttaaagaggtagagccaatcacctttcattcccacctctacttattattaaataaaggtggggtgttagacatggctggttaaggaataaaggcgttgaattctcaagactgcttcctgctgtcgtggggggggggcgttgaccatctttgggggacccgagagggttggggtgctgccacaacctggggaagctggtcagcattcctcttttcttctttttaaagaaaacaataataatgcccaacagcaaatggaaactgatctgaaaattcaccctcttcatataggtagggaggcttattttaactcattcctttaaaaattttatttatttcttgtgtatgtgggcatgtacattgtgacttgcacacagaggtcagaggacagtagcagaagttggttctttccttccccctatgtgggtccctgggatcgaactcaggtctccagacatgacaggaagctgtaccatctcccttgtccttaattcctctttcatttcccagttctggaagtccgtttctgtctccacagagcattgtatctgcagctccacttcccgagactttgggaccagattttaatcaacttttcttttggtatgatttgtaatcattaaatgtctaatccatcatggtttctgttaattttttttaaatgcagattctagatagaaaacctttctaattctgaattttttaatgcttaaaataagaaggaattcagagtaaagcacctatctaggcagcattgtaagcgatatattgggttagttcatgttcctttggtgtctgtggtcttaacttagttctgtgacgtcaataggctctgggtccagaggtgtgcatcagaacacattgtcacagtgttctcaccttatgaggagctgcccagatcgtcttccccgggagttggatttgttcacacaaagcacgtgacatgttccaggggcaaaagatgggaaaataaattaacatgtcacttatgaaggcataattatgtaccagctgccagatccccccagttctggactggacgttttcccaatggagggctaccgccgatcccttacacagtgtacagttttagtagcacccgtgtctccgattgacaaattttgaccaaagagaagactaaacaacatttaacttagaggattctagttgtgtggggattaccatggactccctttacaggaagaaatggattgtaattttttaaaataattggcaccaggcgatgtgcttgtatcatgctcgcagtagtgctgagcagcagtaaactctaagaaggtcgcattttattgcatatacctgtctgacaacacattggatctttgatattaatgaatttattgacttacttttggttagttattatgagacttaatttttttcctcccagtggcttaagtatctaccaatttggggaacttaattctttgctgttgtatttgttcacaggtggcaaactctggtcatacatcagtaaatttctaaacagaagttctcaagaaagctttgacattaaggagacgaaaccgtgcgtgcctcaccgcgtttacctgcagcagccaagtgcgagccctcaggacagcagcagcttcgagtccagagggagcgacatggggggcacactgcaggtcctgccgctgaaggccagtctcaccccaagttctcaggaggacagcaaccaggaagacgacggccaggacagctctcccaagtggccggattcgggctccagttcggaggaggagtgcacggccggctacctgacgctgtgcaatgagtacgggcaggagaagatagacctggggtctctgaacgaggagccgctctcgctgcccgcaggagggcgagcgccgacacccgggcgagcgcggctgcggctgcggctgcggcgagcttcccggcggccctggctgccggcggccccagccctagcgcgcctcggcccgggttctgccctggagatgaccccgacgacgccacatccgattccctcaccgtgtcgaaaaacagccccatggagctgtttagaatcgacagtaaggacagcgcgagcgagctcctggggctggacttgggcgagaagtggcagggtctgaaaccagagcctctgaaagcgctcttcgcccaggactcggtcagcaggggctcggacgactcggtccctgtcatttccttcaaagaagcggctttgggggatgtctgcggtgcagaggacggaaggcccgacctgctggtaaacctccccggagaactgcagccaacccaggaggcctcggcgacccaccgcacccagtttgcgcaggccggggcaggcaggctggaaggcaaactgctggaagccccggatgtgctgtgcctcaggctgagtccccagcagtgccagggcccgggacaagaaggccccgaggagccgagcgagggcactgggcccctgccctgtgtcctgactccaaagcacccggctcaggcagagcccggggtgttaggccccgccgctgctgaccacagcagcccagcagaccagtttctgttgcccagctcgtaccctgagtctgcagggctgggacacgcggaggccgcggtcaccgcgcacgcgcacgaggcgggagaaagcctgacccacacttgcagcccacactcaggtgctaagggatacggtgcacagacagacactgccacagtggaggaagtgttactgttcacagagcaggccaaagaggaaccgagccctccatttcagagacactctgagaccaaggagcaaagtgtgctcgccctgggaggagacaaggaaatccatcagatctttgaggaccttgataagaaattagcagtgagctctaggttcttcatcccggagggctgcgttcagagatgggcagctgaaatggtggtagcccttgacgccctgcacagagaggggattgtgtgccgcgatctgaacccaaacaacatcttattgaatgatggaggtcaggaactttcgcaaatgcatttctttttattcgctgttgcttccaattaactgagtaggcgttttatcttgtaattagtatcttcatttcctgtctagagcttcattatcagtgcggcaaattcacccccagtaatagcttctagtacttaatgatgccattattcttaatgatactgtttttagctacaaaaggagtaattacagttcgcttctgcagaaaatggaagagaaaaatgttttgatttctcctgtcgttttgtttttaggacacattcagctaacgtattttagcaggtggagtgaggttgaagattcctgtgacagcgatgccatagcgagaatgtactgtgccccaggttagagcaatctcctcaaacgcttcacttgaaaaggtggctcggtggctcttacttctctgcacaagttgtgttattcaacggcagtatgtgttgggtctgctgatctgttctttcagccctccaatgaagagaagtaggggattgaactgaggtgtgtgtgtgtgtgtgtgtgtgtgtgtgtgtgtgtgtgtgtgtgcatgtgtgcatgtgcgagcgtgcccacacgtgtacacttactgccctgttaaaagcatttatttatctctggaaactcattgcattctttcaagtgtcttaagcaaggcctcatgtcccctgagcctcttcacatgggtgaacgttattaagttttattaagatgtgggtgaaattgcccaggctacagtggataaaatgtgttcttttgatgcagtgtgccttcaggggtgaactaccctggaagccgggaacacattttaagatagtgtatattggagagcatagtaaacatgttccctctactttaagatggcccacatagctgaatacttgactcaagtctctcttgcccttcctgcctgctctttattttttaacattacagatgtatcactgtggacattagggcccctccctgtaggcagccacagccaagcatttgattagatttgagttactctcttgccagtgaaggcaggctctgtttaaatccaccgcttcctctcccatcttgagcatttgattcattactgtcgggtgtgtcagccagccgagcaggcaggactcactaggtgtgtcgtcttcagtttgtattagctcacgatcgtgttactgctaagttagctaggcttcataggaaatgataatcaggaacgaaagaactttattctctttaggggaaaccttaaccgtcaagagtggctgggctgagggaaggcaagttttcaactcataatgcaaatcctcaaacttggtccggaacaactgcttgggagctgatactgttatgtagttaatggaacaacaacaaattgtagtgacatccttgcatttttaggcgccactttctaatgtggtgacagctggcacgaatatgtttattagttgcgatgaatttgggggccctgtgggtaaagtgtgctgtacgtcctgaagtggggtccagcgtgctgtgtagcttagagctgagtgccgtgggtgggtgcttgtgccaggtgctgtgtctgtgtctgagcacatcaaggccacttctacgtcagcatctgagagcttctatatgatgggatagaaccattccatataaactctgggtttcacgtgctgacgaaccggtttctgagacctaacttcatttctccgggaagagcagtccctacatttggccagcaggtggcagtgcaccactaacggaccctgtcttctgcagtcttcccggttgttgtccttcatagtgtttgggggtggggtggggggagaatgcagccaaactgtagtccaaagagaggctttgttgtaattgtttgcatgaaagaactgcaccttccagctgcttagctgctcagtgtgtgagcagcagggaagtccctccaacccttgggcagatcagcttcagcgacaaggagaagcaaacccaagagtacctctccccttccagttaacatgaatgaccttaagcctcgagaggcagggcctccaccttgtaatccgaaggggagtgggctgcagagcctcccttagaactgagcagcagcagttcctgtgagtaggtagtcttcttctcacagtggtaacgggtcagtatttcagtgtgtagtgaccacacggcagtcagtaaatagcccccgggcaataatttccctcctgattcccgactctgccccgagcactgctgtgcgagtcagtcactgccgctggagcagctcctgtggtcacagggtgtggaggggccctgcctgccctctgcttaagcagctcacctgtccctgccccaccccgcccccttcccgggaatccttagcctgtttgtccaaaaacctcgcccacctgcctgtactttatcgcatcagtgtatccttttatcttgtggatggtgtgccttgatattttgagaaaaatttccagtaacagattcgatttacatggacagaaacttgagcaaatgccagactagcaggggggccattattctgttctataaataagtttagaccagaaaacacttgctgaaacctgggaatcaacatgttttggtctaattgaggggaaaagcaagatagataaattttgaaatgcaaatgattaccttctgttttaaagaatcgcttttgccaactttgtgatcttagatttagagtcacaggcctccagccgtgtggactactaaagcagttcagggctcacaagttctgcaatgaaactaagaacttaaaaaaagttgcccttttatgttaaagaaagcagatccaacaacacaaagacaaacccgtggcgctctctctgtctacgtctgtgaaaaatccagcccttgaatggctgcagctgcagctccatcaagagggtcttgagactacgaattcatgcatcagactcggtccgttttcaaagcggaggctcctttcaggtgcattttgttcctccagttatctagcagggttttattaaacaaacaccgatcatggcaaatgggttcctttcgtgccacagatacacgggttggagggcagaaagtgaagaaaggagagtagtgatgcaccaggtaggcggaggatatgcagctgagtgggaccgcagcactgagtgggactgcagcactgagtgggtccacagcactgagtgggaccgcagcactaagtgggactgcagcactgagtgggtccacagctttgtcctctgtccaggcacagctccgggatgccctgggagaggtggtggaacaaagccagggtgctgctcacctttctcctgagcacttgcttatagcaactctaattttatttccaatgctacagaaaccacggcttcaccaagtttttggcccaaggatttgaaacatttcttcacttggtggcatagattaaattttcattatagcatttttaatgtaataaaaaaatattatgttgggggctatagtcaatgttttcttagtgttttttcatagcagtcttgactgttacggtcagaggcagctagaaatagaacttattacctgtgaaatacaaagacaggttgaaaattgagtgtgcaggcttgcacaagtgagcagggttagtcacgtgtttgtcgctaagctatcatcctcactggaattcccactggacccttaaacaagtcctgtgtatccttcactgttattttgcaccccatcatgaggctttgatcttaaatacttgcaatttgcagagtatcctgaatttataggtgagtgtgtgtatgaatttataggtgagtgtgtgtatgaatttataggtgagtgtgtgtatgaacttataggtgagtgtgtgtatgaacttataggtgagtgtgtgtatgaatttataggtgagtgagtgtatgaatttataggtgagtgagtgtatgaatttataggtgagtgagtgtatgaatttataggtgagtgagtgtatgaatttataggtgagtgtgtgtatgaatttataggtgagtgagtgtatgaatttataggtgagtgtgtgtatgaacttataggtgagtgagtgtatgaatttataggtgagtgtgtgtatgaacttataggtgagtgtgtgtatgaacttataggtgagtgtgtgtatgaacttataggtgagtgtgtgtatgaacttataggtgagtgtgtgtatgaacttataggtgagtgtgtgtatgaacttataggtgagtgtgtgtatgaacttataggtgagtgtgtgtatgaatttataggtgagtgtgtgtatgaacttataggtgagtgtgtgtatgaacttataggtgagtgtgtgtatgaacttataggtgagtgtgtgtatgaattgaagaagtgcaacatacttttcactgagcccatctccatgctcccaaatgtcaaacggcagctttgcttccttggttaggcgatttcacgcttgcaaacagctcgaagctgtcggtgaaagtgaaacacagaaaagtaatcctggaaagtgtctgcaaatctcagtgtagagcatgacactcaggtgctttcatcccgtgctccttggcccacggcggatagtccatgaatgtatttgggggtgtggtctcccttgagcttctccataacacgcttcccctccatttctttcttgtaagcatggtgctcagcagtgtagttaggtgtttggtatgagatgctttcaaactgtggagaccgtcgggtgcctgtcaggtagatttagatgccactgagcatccgtggtgctggacctgggttcacttactgtgtggttttgagcagcactgatccagacctggccttcactcactgcatagtcttggacaggtcatttaagaccttccagggctaaatagtaataagtagatttgttgagtagaaatgtcacctatgagccgggaggtggtggcgcatgcctttagtcccagcactcaggaggcagaggcaagtggatctctgtgagtttgagaccagcctggtctataagagctagttccaggacaggctccaaagctacacagagaaaccctgtctcgaaaaaccaataaataaatggaaatgtcacctatgttaaccacatgacacccttcttatacaaaatttagtcagaattcaagttcatctagtgcaaaatcccacctaacagtggagttaaaagaattactttacttggaagacttttaaagtatatattttacttacctgtagggtttgtatataagctatttactatggaaatgagggatttattgaaaacatttttgtttagaggaacaggtcagacacttttgaatgcaccaaaagttgaatgcgtggttcccagcaacaatgagaatgatttacagaagtaaggtttgtttagatgagagagttcagagtcctagagtgattttagcaggcagcagcaaaataaataaataagctgtgtgcccagaagtagtgaggacatagcaggaagagggatcgtggttgtggagtcttttcctctcctggagaaagccttcaaggctcagttgtgtttgtggtgaaggctgggtgctgacctgagattgtaaaacttgatcagtaggtcccaggtacatgggtgaaggaaaaagcttgtagattcagatacctttattcagataaataccagccaaacgcaagccagagcgtgcccaggggcagcaaggcgtgtgttgcatgtgcacgcgtgcgttgcatgtgcacacgtgtgttgcatgtgcacgcatgtgttgcatatgcatgcgtgtgttgcatgtgcatgcgtgtgtacgcctgcggagggagaccagaggttgataatctggtgtgtcctctattgcttccctctgtttgtgagacaggctcttcctatgaatgtggaacttgccattaggctagactgcctgtttagggagcctctgggaatctttctgtttgtgttccttgctgcccccagcatgcctgactttcagtgggtttggagttttgaactgaggtcctcatatttgtgcagcaagcagtgtaccccctgagcagctctgctgtctggaactgctgaatcttaagcgtgagttcttaggcctttgactggccactttgatttaaaccatagttttgtttcttataaaatctgtgtctcagcctctgtgccacactgagggcttattccttctaagcagttctccacaaatatttccctcagataaatgtctggcgatgctaaggttttacaaagttaatggcagtaaggcagacggggcttctgaagctccgttaacagcacgccgcccttggcctgcctagctgggcagcagagcagtgggaagagagccgtgcctgtcattccgtttccagttagcctttttctcatccatcaaccataatggctttggtcagggagcacggtgacacccgatggccgttcagagtggtgttgctgtgagatgagcagtggaaaatggagcctgctgttggttttctcctgttacaaatgtgggccgagggaggaagcaagattgtgtagctctaggaattatcatcaaaatcagtcacccagaagcacttacccattgcttcttttatctcccaagaaaacggcttgtactgagatctgtaaactcctccaagaagtgatttttggccccagagtgctgaatcaagtgaaatccaagtgtttgattcaagttgtgcagaaagctcaggaaagtttagaacctggttgccaggcaggtgagagaggcctatcccgagtcagccagcagggcctgtgctccctagagaagcccctggaggagataactcggctacttaacaccagctgagttaggagaggagtcaggaagcaggctggagtctggggtgagttcagagtaggctgtgtgaggcggaggagggctgtgccttgttcccgggaagaaggaaggggccacagccgcagtttccgtggataacgcactagctggttagagccctgtggctctgggaacatgtgaacatgatgactgttcttaggccccgtgtgacaattgtacctcgtgcacagcaatggagcaatgctgtagaacttgggaaatgcaaaatgcacagctgggccggcaatgtttctgaaataagacagaaggagagaaataattcctttgaaaggataggctgggacgtgggtgttcctgtctgtccatctgtctgtctgcaaattaagacctgccttggagatgttgtgatctcttaggctggtagggctcacctgatcagatgaactggctttgaccctgggccccctgtgaatagctgtgatttttcagacataagctttagctgctaagctttggtaatttagtttataggtattagagggaccatgcagacctgtaatgaaatgtggctttaaagactggggtatagggtgtagctcaggagcggccctaggtacaatcattgacaatgccattaagttttattctcttgttgctgtggcttcgtttgtaaaattttgtcttaattgtgagaacttaaaaaaaatcgtatctaagctgggtctggtagcacatgtagcccaggctgagatggaaaagtcttgggttcatggtcagctagacctgggcaagggcaaggccctgtctgtcttaactcctaacttcccaagaaaatatttccctgtttctaaagtaatacccagagcttaattagatagtgtatctgtctatgattttgtttttgaaaacattaaaaacaaaaacaaaaaaccctgacacccgtggcccccggagagatagcaggtgtgagtctgttagtcacaccattcttagtgtcaggtgctgggtcctcactctgggcagggccaggaaacctgaacttctcccagtcattttctttctgcctggtgtttgccaaacctttgcctttcacaggcccatgccacctgcagtagagcaatctgtcacccagaggcagccactgtcctctgtgaggggcactaggaggtgtcgctccattctccagttgaagccacaatcgccagctagcagtgccgccgatagcaacctctttactcccatgtccagcacctcagacctgcgttccacctgccgttaaatgtcgtagtctgccaggtgtaagggtgcagaggacttaatagatcctggcttataaaacaaacattctagggtatttgtaagtactttgaatgccgtgaatgagcagtgctgtatgatgcaattggaatacgaattcaacaaacatttcttaaaagcctcctgtgtcccaggaactatgcctgggagccagatataaagacataattggtataatattgacagttacttctgaacttttaacagaggatgtgcacaaccggctaaccaggatgttaatagaccttcacaggcaaggagtcatgtttatagggtggaaatgtccccaactaacaaaaggcgtgcttagccatcccccctctcacagtggagtccaaacaatgctggacacaaaatgccttcttgtgtcttcccctttgctctttagtcatcagctgtagtggaaaaactaatgcttcgcccctgcatagaaaatctttacacgcagcaagagctgtgagagaaattgacgaggattttgtaattctagtccctttcaattagcaacagatgctgcagggagagcttgcctgtgtgggagcgtgggactaatgcttcccagcgctagctgagggttgctgcagcagggggaagatgttctttcccttggttcgcatgtcactaatgacagatggcttgatgaagccaccttgctttactatcgaagtgcctcacttatgcctggctcccttgtaagaacttagcaaaaatcttgactattttaaatttcacagaatattttaaattttagaagaattgaatatgccagttccccccccctccactgtaacaagtatgtgcatggtgcttaattttaagttaatgaaattttgcctttattttttgtatcgtttctctctgatcctaaaagttaataggtttttcttggttgtttttccaagagggagttttaggatcccaaagagccagctattcagggctgcggagatgagagggttcagttggtatgatgcctgctgcacggacaaggcttgtctgggtgcagtggcacttgtctgtaaccctagcactgtgtatggggtggagggaggcaggtggattcctggagaaccctggccaccctgtccagcctaggtggcccatctcaggtactttgaggatctctctcagaaactaagtggagagcacgtgaggaagactgatgtccaacctatcacctgcacacacgcaggcgtacacttgtgacacacacacaaggtcagactcttccttttaattttctcttccagaaattaaaacatttacttatgtcctgctgtcttagaggaagctagcaaggacagcatgctgccgggaaaggttatggaattgccccttgaaggcagtttaacatcttttaaaactaaggcagattctgaatttgggatgcttggaagatgcagctgccccatctctgtggcgctttgtgggaaggtggttttcacttacagctcgagtgggcttaacctgcctttgcttgttttcagttttcagcagagtttcagctgtcttcggttttacttttgacttgagcctttgctaaacccggagttcaaactgcatagtggggggttgcaggcctggtctggcaggtgtgcaagggtgccaattctgcattcagttatgtatccagtgtctgcagatctcctcaggcctgtgagtgtgcactgggctgtgtggaggaccgggtctccttttgtaaacagactggtgtcccttgaactcacgatgtttctgctctagcctctgagtgttgggatcataggcctgctacccacataggttcagaagtagtctgcgctttccacgtctgcccctttctgtctgtctctctcaggagcttctttgtgtagtttcatctctggactcagtgaaacacagtcattttgggatgtgagaaggggcctcagaagacaggcagtcacgggctaagcaactctcattctgtgtttcagccttgggtgatcacatggctaagactgcgtcttcattaaggttttctattgctgtgaggagacgccatgattgtaggggaagctgtagccacgccttcttaggggctggctacaagagtacctgagggcttgtgagggcgtggtcagagtgagtagggggactgcgttttcggtttcggtttctctttgcttcttgctgtacagactaccaccggctggctggttcgctctctaagtaaggcttttccctattaaatacccttatatttctacctgactccgtattggtaattacctactatacatgaccatggcaactcttataaaggaaacatttaattgaggtggtggcttaaagtttcagaggtccagcccatcgtcatcatgatgaacatgccagcgtgccggcagacatggtgctggagctgaaaggaagggtctttgcaggcaataggaagttgaccgatagtcacgatgagggaaatttgagcaaagagacctcagtttgccccttcgaagacacacttctccaacaaggccacacctcctaatagtgccggatttgtgtgtgcccctatgaaccatgatggtttgaatctttagtgggaattaagattctatactgaagttaggatgagaatggattgtattaaaatgaaattctagagtttattaacactttcaacatgctggatgcccttatcattgttccttttgtggatgagctgagatataattcaagctgccccagtctttgtgctgtgagatgatggcgacacaccttcgtggcacaggttgtcagtgggttcccaggggaggagggaggtggcatggtggctgggctggctggggtgtgtgtggacagagacggagactgaagcactcttgttcactatggcattatccactccttggcatcttaagttaatggagggaggaaaagccgtgtgaacaactcatgaacacttttgaaagctctttcctggaagatagaattaaagccactagaggtgggtggagtggaagagaccagtgtcctcagtgtagagcagtgctcacaacacagagccagagcccagtcctttagctctacaacacacagacaaacacctctaattctttgatgccactgtcttgtgtttttgagaggagaacctaaggatttttggggggagggtggggttttcactggtcattttgctctgtgcctgtgaggccactgtacttatggtgaacaaggacatcacccagcctaggagttgcaagccagggtggagcggtgctggggcatacaggaagttaacaccttggggaccataagaaaaccactttgaaattggcagaatgtcctctaacatgctccaaagaactttcaagatggagttagtctaaaaggcttcccagctttcctgttacactgctttatgtggtattctttacagtctctacattaaaatcttagtgaatcctgtgttggagctgggagtgtgtagggtctcgaatccagtgctgctgtccatgtgagcctctggctggtatgtccatctcccatctcatgatgggagagctgggattatgaatgtcagccaccacatccagctccctctttaggaacatgagtaccaggctcgtgcaactcttacctgccgagccacactggcctgcagtctgtacagtagtgaatgtattagctgtctcacagctgtctgtttgaaccactgccctcactttgtgctggagcttcaatgtttttaagattttgcaagtaaagcagtttttttttgtttgtttgtttgtttgtttttcgagacagggtttctgtgtgtagctttggagcctatcctggcactggctctggagaccaggctggcctcgaactcacagagatcccacctgcctctgcctcccgagtgctgggattaaaggtgtgcaccaccaatgcctggcaagtaaagcagttttagagcagtgtgagttttgtggtttgataaccacaaaaaccccactttctttttagcaatgtaatttcgtattatatattaaaaattttaatctaggaataattgtctttcaagggtattagaaaggcaaccaacatcattcattctgatgattaggagagagactttgtttaaagcctgtgaaacagaagttcagtgagaacttagttcacttgttctaacatttcagcctccagccgccagaaagttcttctttgtatcttacctacatgcagaactctttgttgtagattagagtcacctaggaaaccaggcgcagtagctcgtgatgtcagcttcacattaatcagcccctgcttgatactacgaagtcatttcagagtctctcgagctacattgatggatctaaaacttgattttctccctatgggaaaaatcgcatcactttacagttgtcctcatgcgccagccactcaggttaaaaagcccacacagtgcggtggcctttatattgtggtggcctttatattgttgtacacaggttctccagtggccggcagtctttctgaaacgttttcaggggctgtgcgccaaaggtgtggttgctggctcctgggctgtggggaagtggctgggctccatggtgctaatcttgtcagtgagtgacccactctcggagggctgacgtgatattatttggaaggttaaagcatgtgatggcaaagtgtgtcttgtcctcagcctctctgtctctgctccccggtctccatgagggtttgcttcattttgaagccataagcaaggcagcttgccagcctagacgggagactacaaaccatgagccagggcaagttgctcctcccctgagtgacctgagatattttgtcatagcactaaaactggcagggggccctcgtacctttagagtctggagctagttgagtcagagggaaaggaagagatgcacccgtgacagacgtgacgatcagggaaggatggaagaagagacgaggaatgacagtgtcaggcgccagggcacagttcaagaatgtcaccactgtgcctgtgccttgtgcgtggtggacaagctgctgacccacagaggtggcaggggatcggctttgcggctgctgtgttgggtcacatccacaggaccacggccactcaccatacacagcctgtcaaacccctggttggtgtggccagggatttgagggcattaaagctggtgaacctcgctcttggaggactagctggccaagcccacagcacagagaggatatgccaggtctgtctgtgcaggacctgggaattcccacccagggacgtcttggactgtggccttgtggagtgtgttacactaatggtgcaggcccacctcagtaagcctgcaagtagagatgggcatggctccagtctggaactcctcagacaggttgtgcgatcctaaaaggcattttctgacttccacattctctgagctggctgggtcagcatcctgctgctgctcacagaaaagatgatgtctctgtcttcataggtattccatatatgtgtgtgtatgcatatatatatattatgaattatttaacacacatacatacatacatacatacatatatgtacacacacacacacacacacacacacacacacacacacacacacgttagcctagtaatgtgggctattgtgtgactgctgtgccattactgtgacactagcccagtataacagcgtccctgcatgggaagtgcagagtattgctagcacattctaaatgggtggctgaactgtccctttggccttgagttctgaacaggtaaaaaccttaattaaactaagtaacacatggctaccaactctatgctttttttgtttgtttgttttgtttttgtttttttttttcaagacagggtttctctgtggctttggaggctgtcctggaactcactcttgtagaccaggttggtcttgaactcacagagatccacctgcctctgcctcccaagtgctgggattacagggatgtgccaccaatgctcggccctccaactctatgcttaaagaaatggaacagaggacaaacatacattccctatgggtgctggcagggggacctgttttaaagtcacattatttaccagtgtgtcagagtcttgagcatttgggccaatatagagcctaacttacgctgcttctatgtccatactggttgatgagatagactgagaccctacacagaagtctgattacatcagtgtgcctgagcaagacacttagatgttactgaatggccagtgagatgccatgcaaggattctgaacagagaaatggtgtaagccgttgtgtagactggaaggaaacatgcaaagggcgatgatatttgattgcaggcctgtgaccatttcctctatttttctaaggcttctgggaacacacaccctggctaacatttctaagagcatttttctgaaggtagcagtggctctgtgtgtggaggtgggggtggtacagctctgaaacagagcccccaagtcctgtgtctcctgagggctgctgaataaggtgtgagttgtggagcttagaacaaaatttaacccactgacccccagatcaaactcacctgatgcagaggagatccgagactcatgccaggccttcagtgtctggtccagccttctaacagggagcgttaagtttgtagaaactgtggaaggattgcacatggtccctccctatgccaagtactgtcctgcaaacctgttttctcatcatctcactctgcccttgaggtttgtatcactgagatgtttgtgcaggttgatgaatattaaaaagtgtcaccatcccagaggcgggccactaaagcatttgccaactctctcaccccatgctctttaatcagaattctgttgtttgaaaacagtgtgcgtttgtacttcggttccatgtaaagatgtcattcaacagggctctgtggtgtgcatgtgcttcacagtttacacacagtgccagacggatcctggtcgttcaggctacgaggacagtagttggcaggagctgaggtcaggccataagggaacggaggttgtgattctgtatggagcactgtaggctggaagggactgtggtgggggttgacttatgctaaggctgtttgtttggagtcccaaagaggcgcccaaggctgctgaagtcagtccgtatctggtgctttgctggagggtgcatcgctgccctcaccccttgcttcaggggtgaagctgggtgctctgcagggtgttggctgaagccagagcccctatgcctgcttcacttgcctttcaggttgtcactaaccttctagaagctcctgaatattctgtctcgagttgtaggctccctgcagccaaacagtagtgagctgcttttgttggaatggtgtcagagggcagatactggcaaggtctctggactaaccggccatcactatgaaggaacaaggtctcaagcgggatttagtggctacagccttttagttggtgctcgtatggagcagcctaaaggatggtgcttcagagttcctccaggatgaacaggtagaagtgtagtttctggctctcccaaacccctagcatttctgctcgtggttttaaacagtatttcttctgcatttcagaatgggtgggtttgcgtttcacaggctccctcttcagtgaaagaaacagagatgacaggagagggtagccttatcctgctcttcttatgtgacattggatggtgtgtgccacctggcttctaatggtaattaatataggcataggtatatttggaagggccttctggttacaaggagcctttattgctaaaacaaaagatggtttgaaagcagaaatcagccgagctcccttgaatgtgaaagagtgctgatctggttggttcgtaaaactcaagtacagcatcttgaaggtgtcctccgtcaactgaagaacaaatgtctccatttaatgtatgactgtgtcggggaaaaaatgcaaccccagtaggtgaccaaagagaaaagcgactttcaggggtttcaaagcccaggagtgtttagtatttgctctctcagcattaacaaggtcaccttgctaatacatgttaatttcgaaagtttaattgacctctggaattttaatatcaaccttttttggtgtgtttagaggttggagcagtcacagaagaaactgaagcttgtgattggtggagcctgggtgctgtcctcttcgaacttctcactggcaaggtacgcagtgacctcgacacctagtgcatgcatccagatgccaccctgactccaagtcacgcctgctagccttcctgtagtcgtcagatcagggctgagggaaacttcagtgtcaggacaggcagaggaattgattaagattcggattttttaaaaatcatgcagcactgaataagttgatggcaaccctctgccgtgccacagctacctgggaagagactcggcttccccttgccctccctgcgacacggaatcacatctgtgggggtcgtgacaggcgtgtgctggaaccctccagttctttcaggttcttgtctgaagtcaaggggattaattttttttaaattgctgttgatattcaaggtaacatcttttctcctatacggtacattttccctgtctgcctgttctatacggggacagagagtgtactctctctgattagaaacttttaagcatgatgcttgaggtcaagagaccttaactgagttttgtgcccgtcgcctcctgggaagaatctggaggagaaggatcgtcccacttttgttaagtgtgtgaattggcgatgtaagatcactgtgaagcactcagtggctgatgttgcagttaaactgtaaaatgtagccatacgcaagttgaagcactgactaacaaactctacaccagagagatttttaagaacattagttatttcaaagctgtcggcccactctttggagtttgtgcattatttaagcttttctgttataacccagtccctcagtaacaaaggagaagggttgcttgcacaggcctgtggtgtgagcatggcggctgtcagctgctttgctgatgccctctaggcccatagcctaatctgcctggatgaggctgtgctgatgtctgtgcctccagtttaggccgtggcagctctctgtagttgctgccgtctgccccaggattgaatagggtgtgatgtgactgggataagaaatgtaactgattgactgttgcagacactggtggagtgccacccagcaggaataaacacccacactactttgaacatgccagactgtgtttctgaagaggctcgctcactcattcaacaggtaactgaatcgacctcctggataagtcccttcaacttgcagattagcagagcccactgcagtaagccattaagaagtatttgggacaggaaagactcacgtgcagtcacattcagactgagcacggcacatttgtgggatcagaggaagggctgaaactggttggtactaatttttatattaatttggggctaatattgagtcagtcccatctgcttatggagtgtcagatcagattgctttggacttgtctgggactgccctatttccctattgtattatgtagccatttgttgagtgatttctccactcgttaattctcatttgcacaaggagaagggttatcacatgttgtcaagtcagccccaggtcctcctccccttggtgggactggagccctatgccagtctgtatagttctggtggctttgagaaagactctgctgagaacttaggtgcagcatgtcagaggtctgggctcccgtgagctgctccagctaactctcctctcctctatgtaacaacacagtgcaggcccagtgaccagagctttctgggatgagggtttggtagtgtctgtgtgactttatagctaggcagtcctaatgaaaacaattcaacatcccaaatgctatgaaatctaacctttttgagggcccgtgtatactcagggaatctaagggttcaggatatctgagaatctgttcagatgcaggctcctcacctctgcctccatcaccctgaggcgggggtccagctgagggaaggtgctatgttgtactgtttgttgtaaggggctcacagcattgcagactttatacttccatggaagtcatcaaacaaaaaggcgatttaaagtggatataccaagcaaactgaaattattcagtgaatatggatgttttgaaatcagggaaaataaaaattaaagaaaaaaatgaggcatatggagaaaaaaaaatcccctcattttctcctatagaataattttgattgcatatggcagtactgtgtgcaaggaaggcatggtgctgaaggtgtgggggctgtggagggactcagacaggtagacactacctcagagctctgcaagtcaatataaggggtcctggcggtgctgttaggacctgttaggaaagctgtatggactgcgtgtttttctgctgggccttggcatagtttagtaggacaagggtagatatggggaaagtagcatagggggactgaacagtgacaagagaggttgacacagcgtgatgggtgaatttagagtcatagtagttggtgctttctcaccgatgccgttgtcatgaacagagggtggaaggacccagctcttctatgatgtgctatttgctgtggtgcagaaaagtgaaagtgtcatagctgaattaatttgcccaacactgtgaaatataaagaaatgtggctgtgggctgggaatgtgtttcagttggcagggtgcctgcctggcatgttatagagcccaaaagtcccttctcagacccaacaaaagcaatgtgatggcacatacctgttgttaaggtcattcttggttactggtaagttgggtctagcctgggatacatgagatcccacctcaaaacaaacatacagaatttaaaaagtgggggggaggagaaggtttgggagacagaggaggaggaagaggagggaggggtgaggagggaggggtgaggaggaggatggggaggggtgaggagggaggggtgaggaagaggatgggagaagaggagggagaggaggatggggagggtgaggagctgaggggtgaggaggtgagggaggatggggagggtgaggagggaggggtgagaaggaggatggggaggggtgaggagaggaggaggaagaggagggaggggtgaggaggagggtgaggaggaggatggggtgaggagggaggggtgaggaagaggatggggaggtgaggagggaggggtgaggaagaggatggggaggggtgaggagggaggggtgaggaggaggatggggaggggtgaggaagaggatggggaggaagaagagggaggggtgaggaggaggatggggaggggtgaggaggaggatggggaggggtgaggaggaggacaccgtgggaaggcacagtgtgcttaggcacagacactccgggccttgatgtgtagtgtcagagaaagccacgtacaaccacataagacactccgttctagctgcttatttggttccatcttctttattgtggtgcaagggaggaaataaaaaagtatttgtggaggaagggcaagggaccctgcatagaaatttgaaagccgcgtgccagattgctgaaaagcaataaccaagaggaaactgtaaagccaacaagagagagactcacctcatgggaggccattaatgcttggtttcccattgaaaacagcaaagagcagagggccctagagtagcattcattatattgaggtgaggtatcagcctgtaattcataaaagttttttttttcagaaaaggtgtaataaggacactcctggataaagaatgccgaagtagctccagccatggacctacatgccaagagctagggactcttggggtgtcgggatggtggcaggttgggctcaagtctgagaacactgtgaacagtgcagtggtagagagaagttcacaaaaagtctacatatgtttttttcccccatttatttcccctatgtgtttcaaaaagtacagacacatgtaatgacaattatgaactggtgctgttgggtttctgacatgtgtagacacggtgtgcacaccgtgctctttgtgtaagtcccttcttcatccctgaattcaagcaacatacacatatatgtacataatacatatatatgcatacatatatacatacttgttttaattccaggctgtctgggcagctcaacctctaatcccagcacatggaatggaaggttgaaacaggaggatgaccattagtttagggccagcctgggctacatattgagtcatcccaggccaatttgagtcacagtatgagctggaaagggttgtgtgtacacgtttttctcatcactctctccacactgcaggcaggagctgtttgcatgttggtcacattgtgctgtgggttagagatacctgagatgattggacgtgcacagcaggacatagattgtccagcactgtcaagggcttgagcccatgtatcttggtgtcctgcagactctggactgtacccagcagtgggccacggaggggaaaatccctgcctgtcactgagttactgcagctgctcaaggaaccctgggaacactctgagtgagcgtctgtacacactgaacaaaggtctttaaagtgcctggaaaagtacatgggacagctttgagttcaggtacaagtgggttaaagacaaaggtgaaggacaggtaaactgtgcacacagtcacctggagggctggagtgacactaaaggtcagcaaagtggacattagggcaggggtttgccagaaactgatggcatctcaggagaagatgtcaacacaggaaaatgtaaccagtgtaactagcgacagccccaaagtacatacaaagactgacttgagaggaaaaatagttcagcaatgtaggtagttagagacaccagcaggctacaggggacacatggactggtacagcagaaggctgggcagtgactgcaaagtgtacacgtccaccacgtgcactgagagcatgtgccatgtacacagaaacctccgtgattagcaaggccgcaatccagctgtgtactctgaccacagaagaggaattatcaatcgataacagacaacaggcacgtcagaggttcaaggtcatccttggcttcacaacaagttctaggacagcttgggctgcagtagatcctgcctcaaaaaacaacttgaaacaaaagacccccctccccaatccccaaagaatcagctaaatccacagttacttgggaattaaagcacatatttacttctgtgtaacttatgggtcaaagaagagatcataagatgagtcacagcccagtattaacggaatggaagtagaaacacacattggggctcatggaaggagctgcaccagttgtcacactcgagtttacacccctgcgtctacaaaatgaggagacctaacctcagagtccagcctgtaccttaagacactgaaaagaactgggcatggctcatgcccataatcccaatacttggcaagctgaggcaggagaattgccaggagttcaaggcatgagtccctactttaaaaaatgagtaaatacatacagaaaaagaactatacaaataaagtaaacccaaagccagcagaagaaacagaaagcagtgagagagaaaacaaaaaagaaaaagaaaaggagctatactttgaaaagactggtggggtggggagacgctatccgactacagcgtacacaggcagagacgcttgggcatctagaccgctcttaaggaacgctggtcagaactagctaaccctgctgcagtcctcaagatggcaatgcgctttgtacaagtgcttggaaattaatactcacttgccaaaccacagtgaactaggccctaccctcacttcataccatatgcaaaaattaacgcaaagtagctcgcaggcctttgtggaagagctaaaactgtaaaatctgtagaggaaaacatgagaaaacactcatggccttgggctatggcagagctaattagatataacaccaaaagcacaatccataaaaggaacattgataaagtagacttcattaagattaaaaaaatgcgagcacttcaaagatatgtggaggaggtaaaaacaagccacaggctgcggaagatgtttgcaaaccgcttgtccatgcttatgttcagaatgaataaggaactcttgtcacccagcaagacagacaactgagtttgaaaatgggtggatgtgagctatctcagcatagcctctatatgaatggttgccagggcacacaaccatgatcagtgtcattagtcactggggagtgcaatcaaaatcacagggagatgccactaaccttctagagccgctcttatgcaaggtcagaggttgctggacagaaaacccaaagacctttctcatcgctgttgggaatgtggacaggtagagccacgctgggaaagtttgccagtttcttagtaagttatattcaaacctgctgtgtgaacgaacagttcttacctaggaataaactcaactggaaacatgtcctcctgaggaacgcacaccactcttaacagcagtgtcattcagtaccatctagaactggggacttggaggcccactagccagtgagtggactaacagcaggggaggcaccggggactgttgatcaggaaataggccagggcttgcctccagatggttcagtcccacaggcgctgtgctcagtgagggaagagtgcaggggctcacttagcactgcattccatagattgcccagaaagggcaggctcagagacagtggctgccgtgggccaaggtctgggggacataaatgtcacagagcagctgccaggcttttcagagaggtgtaaggctggactggatcctacacaaatctaagttgatcacagactgttgacctgtggcgtgcaatagatgtctatatagtagataagttgtccatacttagtaaagctgttaatacaaaatgtgagggtgcaggaatgtctctggcacactctccgagcatgtccaggaccttcatatggttgtacacaattacttttgatttttcactgttaaaaatctgactacctatgacattacttgcttgttttatacacgattcctaattctgaacaagtcataacctatttcattcactggaccaaattccttcaccaaatgcagcagccgtgccagagacagtggtttgagggttcggagatttgcttgttcagatccaagcttgtgccgtcctgatgtgttgtagtagctaaagaactgaaagactttgtagggctcctagactcctgagtcatggagaaagtagctacctctcttggtctcctcatcctgtttgaggatgaggaagccctggtgagttactcagggccatgtttgcaggtgttgacaaggttgtcactctgctgggatgctccacaagcccacagccagacggctggttggccatagatggcctattcatcgcttggttgaatcctgaagcccttcccttccacagcctgttttcctctcgttgctactgtgtttctgtcactcacagaatctcccgtttcagctcttgcagttcaaccctctggagcgtctgggtgccggagtggctggtgtcgaagacatcaaatctcacccatttttcacgccagtggactgggcagaactgacaagatgagcatcgtgtggagtgttcttcacgagatggagcccctcaagacagatctccaggagtatctaggcttcggtcacccttcagcgggtgcaccagagcctcgggacaaggccttagaggaagtgatgggtcagggggctaacagagtcccttccacctgatgtctggacgagagcttgagagcttggtgaaccttgccagcagctgtattgcactggccctccccaagataagatgtaactggccttcagggtttctggtgtgtggcagacatgaatgagaatgcctgtgcaaacacctctgctaggaggctgtaagtgtagaagggagattttggtggcagctaatggtgcttctgttatacaagactgtttttcacgattaagtcgatattgctgagtaacacactaaatgcgctctgtgaacagtgccaccaacgggctgacgatgtgacagggaatgcccagtgctgagcagggctaggttgtctgaggaaaaaacactctggccggcctcggacttgctgctcgatgctgctaactctgcagggctcgacgtctgtcctccagctcctctctcccctgctccaatcccgcattctctgctcattctctcagattccgctttagtcttctgtcaacacacaaagaacaaaaaagggaaggggtatttattcccccaaactgtcagtgtaacaagactaagaaatcatgatgtaaaataaatgtggttgaaacttgtatggcttctttattaatagcttaagatttaaaggttcattttgaagggtccttccccccccccccgccccctttctcctgaggaaggtggacagttttttcttactgtggcttggtgtatttgttttcctttgggctggaataccgggacccatagtctgtcatcacaacccagcgcggtgatgtagggctgagctcctcatactctgggagagaaccagaggttcactggctcacggttactaatgccgcttcttcattttgctaaggtagtgcggctgccaccgtgctgttagccaaaacttgcagatccttaaaagtgtttgtcaaatttcacgaagagattacagggcaaggccaccagaaattactgaaactccctgttctttccttgttgtcattgtgcttgtttgtgtttgttgtatcagagattagactcagaaccttgtgccccagtgctagtcaagcaatgtcccattgagcttcactctagcccctgggttttctttttgttctaatccatgtgcttttgagtctgtgagagaggctaccctggccccaggagaatcttgacatccatctgctgacttccaggtctcccgtcagggtaaacagaagcagaagtgtttgtgggaacacaggaaatgtgcaagcattttccctcttctattatttgcccccttccccctcttcagtccccttataacccaaaacccagctgaagggctgtgacaacaccaggttgggatatagcaggtcaccaagatcagacctcagtcaggatgacatcagtctggaactgggtttggctcaccaccccctggcctcatgacaggaactcatgcaggtgagacacgggaggactgacttcctgtgtgggccggtaggaagtctgtgagcaggccagtgcagaacttccttccggaagtgccctgtgacataaagttaggactgcacaacgaaggtgaagggcctgcccttccctgtgatttgggccccaggactcgaagggcagtaacataaacaaacggtcgccatgtcagttggtgggcatattcccacagccacaatctctctttctgcgtgtttgattggggcttgtacttagcataaacacaccattcacgttggacacaaatgattttagaaataagactgggtaaatggctgtgagagaagcccatctctcatgcagtctctgtacatgcttgaagttccagtggtgtgagactggcttccgctgtagttcctattttgatggctcaagtagagagggttggaatatgggtcaaaaccataaaagaaattaccacttagtatttcaaatgttttttttttttatttgaactagagtaagagtaaattttgtcattttgaatatgtgtgtgtgatcataagtgcatgcgcacatgcgtgtgtaggtcagaagtccgcaccaggtgtgcgtcttagggtttccattgctgtgatgaaacaccatgaccaaaggtaaattgggggtgggggagagggtttctttggcttatactttcatatcactgttcatcatcatcgtaggaaatcaggacaggaactcagacagggcaggaacctgggggcaggaggagatgcagaggccatggagggagctgcttactgtcttgctcctcatggcttcctcagactgccttcttatgaaacccaggaccaccagctcagggatggcaccacccacaatgggctggacgctaattaagaaaatgccctacaggcctgtgcacagccggagctcatggaggcgtcttccaagtgagatgtcctctcctcagatgactttagctcgctgacatgaaactgtccagcaccctgtctctcttggtttctcttcactgtagtttttgaggcagtacctctcactgaacctagagttcaccatcttgtctggactgggtgtgagtgagccccagggaccctgtctcctcctgaccagtgccggggttaggtacatgctgcctgtgttttcacatggaatctggggatctgaacccaggccctcatgttgtgtagcaggtgctttgcccactgaaccatccccgtagcccttcttcagccagttttaggcatatgatgcaaaagtgacatttagcatgcttaagtctttgtgcagccatcaccactatctctcttcagaaatgtgccaaaaccacacctgtcccatggcaactgggtgctcgttctctccccggctcctggtcttcatggcttgggctacggcaggcagttcacataagtggaatcatatactgtgttttcgtgtcctttccaaggcccatccatgctgtgggtcatgtctgtctcttatgaaagacagactcatactccaatgcgtgtgcatcacatttggttaaatgacttacctggtgagtgaaatccagccccacggggagccgtcttctggacctagctatgatctcgatggcctgttcttcctgtcctggctgactgttcgtctgatattagtgctccatttttcagctacctcacgttgcttcttttggactgttgggggtgacggtgtcccgaacttggacgcctgagctcctgagtgcccctctccctgtggactgtgtgttttgcttggaatccccagtgccgatttctctccgctcttctacagggctttgtcaggcaggttgtcattggctcacactaccgtatgaacatcaccgacttcaccccacaggtaggtgactgaggcgtccaaaaagtgaagagagtgccttccgagaatgtcaccacagttgaagattgctgatattgtgacatgagtttgtattatttgagacatatttttaacttctttttttattgatttaaattagaaacaagcttgttttaatgccaattccagttccctctccctccccttctcccctgcccccaactgaccccctatcccatcccctttctgctccccagggagggcgaggccatccatgagagaccctcaaagtctgtcatatcatttggagcagggcctaggccaacccccgtgtgtctaggctgagagagtatccctctatgtggatgggctcccaaagtccattcatatactagggataaatactgatccactgccagaggccccatggattgcccccaggttcagagggtccggattggtcctatgctggtttcccagctatcagtctggggtccatgagctcccccttgtttaggtcagctgtttctgtgggtttttccagcctggtcttgacccctttgctcatcactcctctctctctgcaactggattccaggagttaggctcagtgtctagcagtgggtgtctgcttctgcttccatcagctactggatgaagactctaggatggcatataaagtagtcatcaatctcgttatcagagaagggcatttaaggcagcctctccactattgcttagattcttagttggggtcatccttgtagatctctggacattcccctcgtgccagatttctctttaaacctacaatggctccctctattatggtatcccttcttgctctcctctattcttcccccaactcaatcttccggcttcctcatgtcctcctctcccctcctcttctctttctcttaactccctctccccccccccacactcccaattagctcaggagatcttgtccatatcctcttctctgggggaccatgtatgtctctcttagggtcctccttgtttcctagcttctctggcagtgtggattgtaggctggtaatcctttgctctatgtctaatatccatatatgagtgagaacataccatgtgtgtcttttttgtgactgggttacctcactcaggatggtttcttctagttccatccatttgccgcacattccaagattccattgttttgttttgtttttatccactgagtagaactccattgtgtaaatgtaccacattttctccatccattcttcagttgagggacatctaggttgctttcaggttctgtttattaccagtaatgctgctatggacaaagttgaacagatgtccttgttgtatgaatgtgcaccttttgggtttatgcctaagagtggaattgctggatcttgtggtagactgattcccattttcctgaggagccaccataatgattttcaaagtggctgtatgagttggcactcccaccagcagtagaggagtgttcccctttctccacatcctttccagcataaactgttatttgtgtttttgattttagtcattctgacagtagcaagatgatatctcagagttgttttgagtttcatttccttaatggataaggatgttgaacactttcttacatgtctttcagccattttagattcctctattgagaattttctatttagttctgtatcccactttttaattggattatttggtgttttggtgactagcttcttgagttctttgtatattttggaaatcatccctctgtcagatgtgaggttggggaagatcttttcccattctgtgggctgccattttgtcttgttgacggtgtcctctgccttacagaagcttctcagtttcaggaggtcccatttgttaattgctgatctcagtgtctgtgctactggtgtaatgttcaggaagctgtctcctgtaccaatttgtttaagggtacttcccactgtctcttctaagaggttcagtgtggctggatttatgttgaggtctttgatccatttggacttaagttttgtgcatggagatagacacggatctatctgcagtcttctacatgccagcatccagttatgccagcaccatttgttgaagatgctttttttttttttttttttttacattgtataatttcaggttctttgtcagaaatcaggtgtttgtaggtgtgtgggttaataccaggattttgaatttgattccattggtctacctgtctctttttgtgccaataccaaactgttttcaggactatagctctataatagagtttgaggtcagggatggtgatgcctctggaagtttctttattgtacagggttgttttggctatcctgggtcttttgttttttcatataaagttgagtattgttctttcaaggtctgtgaagaattgtgttgggattttgatggggattgcattgaatctattgattgcttttggtaagattgctatttgtactatgttgatcctactcatccaagagcatgggagatctttccatttcctggtatcttctttaatttctctctttaaagactcaaagttcttgctatacaggtctttcacttgtttggttagcattgccccaatattttatgttgtttgtggctattgtaaagggtgatgtttctctgatttctttctcagcccatttatcatctgtatatagtagggctgctgatttttttgagttaatcttgtatcctgccactttgttgaaggtgtttatcagttgtaggatttccctaatagagtttttcaggtcacttatataaactatcatatcatctgcaaatagtgaaagtttgacttcttcttttccaatttgtatccccttgatctccttttgttgtcaaactgctctagctagaacttcaagtacaacagtgaagagatatggagagaatggacagccttatcttgttcctgattttagaggaactgcattgagtttctctccatttagtttgatgttggctgttggtttgctgtatattgcttttattatgtttagtatgttcctgttattcctgatctctctaagatctttatcatgaagagatgttggattttgttaaaagcttttccagcatctagtgagatgatcatgtggtgtttctttttcagtttgtttttttttaaactatgaaatggcattttaattatatatcatgtgaaataataacagcatataataataatgataattaataataacaatagaaatcttagaaggaactttcagtttgtttatatggtggattacattgatggattttcatatgttgaaccatccttgcatccctgggatgaagcctacttgatcatggtggatgatttttctgatgtgttcttggatttgatttgccagtatttttccatcaatgttcatgagggatattggtctgtagttctctttcttagctgtgtctttgtgttgcttgggtaccaaggttattgaagcctcataaaaagagtttggcaatgacccttctgcttctattgtgtgaaacactttgaggaggattggtattagctgttcttggaatttctggtagaattctgcactgaaaccatctggtcctgagctttttttggttggaagacttttgatgactgcttctatttcattaggggttataggtctatttaaattgcttatctgggggctggacagatggctcagagtttaagagcactgactgctcttccagaggtcctgagttcaattcccagcaaccacatggtggctcacaaccatccgttatgagatctggtggcctcttctaatgtgcagatatacatggaagcagaatgttgtatacataataaatagataaaatctttttaaaaattgcttgtctgttcttgatttaattttagtaagtgatatctatccagaaaattgtccatttcctttagattttcaaattttgtggagtacaggttttcaaagtatgacctgatgagtctctagatttcctcagtgtctgttgttatgtccaccttttcatttctggttgtgttaatttgcatgttctctcgctgccattttgtaagtttggataaaggtttgtctatcttgttgattttctcgaagaaccaactctttgatacatcgattctttgtgttgttttcctattttgtactttattgatttcagctctcaatttgattatttcctggtgtctactcctctggggtaagtttgcttctttttgttctagagctttcagttgtgctgttaattctctagtgtgactattttccagtttcttcatgtgggcacttagtgctgtgaactgtcctcttagtgctgctttcaaagtgtctcattagtttgtgtgtgttgtgtcttcattcttattgaattctaggatgtctttaatttctttctttatttcttccttgacccaggaatggtgcaattgcgcattgttcaatttccatgagtttgtaggttttctgcaatttgtgttgttattgaattctatctttaaagcatggtggtctgataagatacagggggttattccaatttttttgtacataggtttgctatttttctgagtattggtcgatttcagagaatgttccatgtggcactgagaagaaggtatattcttttgtatttggatggaatgttctatagatgtctgttaaacccaaattgggtcataacttttgttagttgctttgtttctttgttaagtttctgttggtggtccttctagtggtgagagagtgtggtgttgaggtctcccattataagtgtgtgaggttttatgtgtgattcgagttttagtaatgttcctcttacaaatgtggatgccattgtattgggggcatagatgttcagaattgagacttaatcttgatggatatctcttgtgatgaggaggaaattatctccttattctcttttggttgattttagtttaaagtttaatttgttatatatcagggttgatacaccacttgtttcttgggtccatttgattggaaaatatttttccaatccttaactctgaggtactgtctgtctttgaagttgaggtgtgtctcttgtatgcagcagtaggatggattctgtctttgtatccattctgttagcctgtgtctttttatagtggagttaagaccattaatattgagggatattattggccattcgttgttaattcttatttgttttggatttggtggtggtggtggtattgtttctggattgctccccccccccaccccgtccccctttttgcctgttggtaaagtagcattatctattgtctatgtttttgtgggtttacttaacttccttgggctggagttttccttccagaactttctgtagggctggattagtggatatgtttgtttaaatctggctttgtcatggaatatcttgtttcctccatctatagtgattgaaagttttgctgggtatagtagtctgggctggcatccgtggtctcttcctgttggtagaatatctatccaggtccttctggctctcagagtttccatggagaagtcaggtgtcattctgataggtttgcctttatatgttagttgacctttttcctttgctgctcttaatattcttcctttattctgtatgtttggtgttttggttattatgtgtctagggggacgttattgtggtccactctatttggtattctgtaagcttcttatacgttcattggcatgcctttctttaggttgggaaaattttcttgtatgattttattgaatatgtttttagcacctttgaggtaggtttctttaccttcttctataactattatttttaggcttttcttttcacagtgtcctatatttcctggatattttgtgttagggatttgttggacttaagattttctttggtgaatgaatctatttctcctagtgtatctccaacgcccgagattcttccatctcttataatctgtttgctatgcttgcatctgtagctcctgatcatttacccagtttttttttcacagtgcacatgtgcacgtcagtgtctttgtgtgtgtgtgtgtgtgtgtgtgtgtgtgtgtgtgtgtgtgcaggtgcacatagatgtgtgtgcacatacatgcagaggtctaatgttgatattgggtgacttcagtcgccctctattttgttttcttgatcatcttatgtgtggatgtgcacatgtgccatgcttggaggtcagaggacatctttgtgaaatcagttttctctcttttcctttatgttggttctgggctggatttcagtagcaagcgctttacccaccgagccatctcactggacttacctaccttattttttgtgaagggtttctcactgaacctggcacttatcaattagagtaggctgacaggtcagtaagcatcaggggtctcctgtaccagccctggggctgagatcataggcctgtgccaccaccctgagcctaacatgggttctcatgcttggacagtaagcactttagggataagtcatttctctagacccaagattgtgtatttaagtgggggaatatagaggatgcatttaaaagtcccccccccatggggatattttataagttactaaaaatatattagctgagattatttataagatatatatacatttgactttttgataaacacctgtagtaaaatgttcagataatcttgtttgtaataggagagatttgggggaggcttagcaggatgatcagaagttccaggccagactctattacatgagaccctgccttataaaaagaagactacacaaacagaggccaggagggctgccagggtgagcagttacttcatatatctatgttgtgctgactcagctgtgatatagtcacactggcctttgtaaatgtcactgttgcctaagacaccacaggaaggaagtgctttgccgtttaaccatttatgaccggaggtcccggaactgccccatacctgattgccagaggaccatcaggtagatctggattgtggtgcccagccccagagagaggctcctgggacaatgtttggctctgcagctgtgggcagggctcctctgcacacagactgggtcctagggctctggcggagaaagggaatcaaggggatgctggctatttttgggggggaaatgcagtttgctttttattttcttgtttacttcccaccctgcactgagcctggcctccgtctgtgtgaccaccaggatgggaccttcgtggaaccaggagccaccctgaggtaaggcacttcctattcccctcagcttgttccggggtcggaaccccctgactgccccttctctgcctgtgaggctctctctacagtatggggtctggctcaggctcacatcatttcgttggccttgctgctgctggggagccttggcatctggagatctagcgggatcgacagcatggatactgctgccccgtccctctgctgcagattggagccatgtcccaaagcttagccccaccgcgggctatcatggctgagggagagaaggctgcctgctgcagctgtctcctgcagaatcagccatccccgcctcccaggtgccagagcagctcctgctgcagatttccaaggagccttttgtcaggtgaggcctaaagccacggtagggaaattacccagagacccttgggcaggccgacctccctcccccccttcctgccctttcttccctgtttttgtctccttccgaagctggggtcagaatccctagccagactgagaacatgcttgctattccaggacccagatgccaatgtgtggcagcatctggcttgttggcaggcatcgccggcagttgtgctggctgcttctgggcctgtcatgtggccgagcctgcggatgggggcctcgtgacaaaacagagtttctttgagaatatggtttcaaccacggtgctcaccagaaaacaatgcactgcgcagaggggacctgggcagggaactgcagactctggctttgatggtgctcctggcctatccagcagagcccccattcaatgcttcagggctggcgtctcctgcaaacttaccttcttgtgcccgcgagtgtcgcaggtgccttaaggcatggagctccttgaaagagaaacgcaaatcactagaaacgctgagatcaaatcctgctcctcagaggcacccgtttggcacggggagctcatggtaacagcttgcctcagaaaggtgacatttctgctgaaggctgaataataaaaaatgcattttaaacactcagcccttccatgtcttgtgctggctgacgtttgaagtgaaggccatttcttctacgtgcggggtctttttcgagggtagccctcaaccacggacacattaacccttgtcaccattgatgagcctcagggaccttttaaattaatgatcacatcgtagggccttcagtcctcctttcaaggtgtgaacctccagtgctgagaatgtgtcagacacttgctgtccagggtgtagagggagggccagcatggggaatgcaaagctctgccttcaaggatgcaggctgtggcagacaggtgacaagcgcctcttcgacctcatcccccacagtctacgtaccagtcacacatttttgtggccaggagagtactctgttaagcagatgaagacatgaaagccccaagaagaggctccattttcatctgtgtttcaagcacacatgagctggctccgtgagcacaggcgtgaggggttcttggttctaagctcagggcagagactgcaatgttgtaactctacctcatttagtaacacatgatttgaagtacttccaaggttcaagtgtcaaaggcttggtccccagcgggtggctccagccacctggaggtgaccgatgatgagagctctgggtggattgatagtttggtggcgttactgagagtgatggaggctaggaggcagggctggttggatggagtgggttgatgtgggcatgtgtagctttgaagggcacagctttcgcctgtccctcacctctctctgcttcctggctgtgaagttatgagcagctcttctgtcacaacactctccctcaccacgagctgagagaccatgaagccagccaaccacagaccaaagcctctgaaactgtgggcgaagggtaattctcttctgaagtgtctctctcaggttcccctcatgatgaagtctgatgacagaacttcacacatgaccccctctgcacataagacaagagcaagggctctctacaaagttgatgcctaagaccatctgaggaaggagtcaagagaaggcaaagactagcttgagtttagaacttccccatcttgtggagagcaaaagaggaacacagagacaacattctccacactcgggcgatcacacggatgaaccccagatgccagcagttgaaaacaaaatcccggcagccaagaggttctggtgtgtgggagagaaagacagcagggacctagcttctgcttgcagtgcacagagctgggcctgccacaggaagccctgggccacttggggccagcagctgcaggtggaggaagggcatccattctaccccttgtaagtgcacagagcttaggaaaggggcgccagcagctggccttcaagctctggacattcatcttcagagctgctgtctagcccaaggccccatgccaacggaaagctgctgaggacaggaccaaagtgagcaggacagagacaggaagagagcaatgtcagacatgtttcaacacttcacccagacaacagaagagggagccagaacagcctgattatccccacagatgaggaggagggcaagctcactcacaggaaagggattcaggaggaagaagatagtgtgtgctgcactcctcactctcagcaagctgaggcaagaggatcatgaatttgaggctagcctgggctatatggtagatggtctaggggtcttgggtgtgttctctctctctctcactctctctctctctcatacacacacacacacacacacacacacacacacacacacacacacacacaaagaaaagaaagaaaaaatataatgtcctaatacacaattgacacgttctggaaactaactgacattaagaaaattacataagacatgaaaccataattaaacagttatttattgtgtgtgtgtgtgtgtgtgtgtgtgtgtgtgtgtgtgtgtgtgtgtgtgtgtgcttgtgtttgtggtccctggaatgtagttacaggtggctgtgagctgccatgtgggtgctgggaattgaaccctggtcctctagaggaacagccagtgctcttaattgccaagccattgtcacagtcataaaaccgtaattaggatacttgaaaatgagagacccattcaggaaagaattgtaactaaaaagaaaagctccagaaatgaaaattgaactagaatgaccaaattagcaaataaaagcaagaaatatcttcatagaaatagcaattgatgatgataatgataatattaaaataatgattgaaaagaaagcaccaaatactgagctgagcaaaaagagtgtgtggggcggtgaggggggggtcatgcaagaaaacactcctgagagtaaaacatgaaatccccagtggacacggcacgctgtgtgtgctgaccatgtgacagcaaggaaaagatgaagaatgctttggggtcctagaaggaaaagagcagaggtttttatacaggatgagtttctcattagcatcatttgatggagagggaaaaaatgtgagtggaaatatttggaaaaacagaaggaaaggaagattgtatgtcaagcaaacctgacttctaagtagaaaaggcacagtgactgtgtgggaattcggggagctcttctctttttgctgtgttgctgtgatagtgtatcataggttgatgacttatgaagaccagagggtgacttctacctgctttagaggctggaagtatgagatcagaggtagatggttgggtttgccaagggtcttctccctagttgtacatgggtgctgtctcctgccctgagttgggagtcagagagaggaagggtggtctcttgtgattcctgtaaggcacaaaccctcttttttagggccccatccttatgacctcatccaatcctaattaccttccaaaggccccaccttcagccatcacacactggcctagcgttcaccatgagttctgggaggacccagacagtacttaatagttcccgtgacctcttcctaaggaatcgggtgggcaaaacattgtaggtaactggagtgcaggggaagccatcagctaaccattcagtacaaattcagcagcggcctgagacctgtgaccacaggagggatgggaggggcggccacaccagtgcttgaaccatggctgcatgatagccatgttggcactcgatgcccagtgagatagcattgaaagacctttggggatggtcgtgagcaagccacaaggcattgttgtcttcatagagaggcacccctttctcaccacacgagaaagcagaacgaagccttcagacatgggtcccagccatggaactaaaagcagtgtttgctgtgtgtaaattacccagtgtagagcagggggagcagatggggtgtgtgtcataaaatggcgatgttaatgcaggcagttcagattacccatgccctctacttcagggaccaggaggaaggagaactggttaagacttagggcatgactaaataaatttgtgatatgtttataatatttgttatttatttatctgtgtattctttaaagctaggatctcatatagctcaggctggcctcgaacttgctgtatagctgagggtaaccttgaacttcttatcctcctgactgtagctccccaaaaatattttatctgtctgtgtctgtctatctatctatgtatgtatgtatctatcatctatctatcctgtgtgtgtatgtatgtcatgacatacgagtgatcatgtgagttccaagtctctaattcgggttgtctggcttgattacccactaagccatcttgccagcctcccatgtattgctttttttcagtttagattcatgttttatacgtagacatacagatgaaaattccaagtctttcaatcagcagtattgcctagtttgtcctcgtgcaaagccctagaggtgactgtgactcgggggagcagctacagcctgcaggctatgctctgccttctggaagagcctggctaggaagctgaccaggctgactgggaacatgttgcagcagacaacacagaaacaaactcctagggtcttccagtcttcagaaaattccaagccttgtcaaaagaactcagaacttcctactggccaaagaggggacaatttgacctttacatgtttgcatacaggacttgaaaatggtaagagatgagttgatcacgcatggaggtttccagcagcagatctatcatcctgaaaatgagaaaagagaagaaagggatcactcgtccttgtttccccatgaagtctgtgcactcaggacagcagtaagatgaaagacaagtgtggggttagagaatgtactgcccctgggccaccccaactgttggactcaggctttaaggaacctaagcctccaggacccccaagaaagccagtggccagcatgcctcgtagaaggtttcaaacgccacttgcagccagtcaggagggctccagcccagagctgccagcttgcaaagaacacaacacaggagcctgagttgaactccactgtgtgtgtgtatgtgtgtgtgtgtgtgtgtgcgcagtccatagcatcaacatggggaagctcagggcaagaagcctgggttcttcagcatgtccttggcaaagagaagcctgtggtttagacccataggatggaaagatactagtgtccagggaggcactatcacaggagaattgttatgttggaggaagggggtttgattgaggggcatttgtagaacttctggggtgcttacatgtgtgtgtgtgcacgtgtgtgcacatatgtatgcatttgtgtttgtacacttacacatgcatgtgagtacttgtgagcatgcatgcatgtgttcatgtgtgaatctgtgggtgagtttctgtgtgtgcatgtgcagtgtgtatctgtgtgtacacatgtctgtatgatgtatgtatgtgtgtgcatgcgtgtatgtctcttttattggagcatctgtgccgtttagagaaaggcagtctttcctccaggcatctcctgctactgtccaggaaacagaggcatctacagtgtctgtcatgtgaaaggcgcctctttgatgatgctcttgtactgtgtacaacccgcacagctttatggtccaagcccagtgttactaaggccagggacgctctttgcaacacaattttgtcctttgaggaatttgacttcagtgcatggtgtgatccagtgggagacatcgaagtgctacgccacctaatatttctcttgttcgctgcagtacatagcatccctgaggtagaattaggcgcttcctgagatgttacacagcattgcaaatggagggactgcctggcagctgaggcagaaagttccatgccatcacatcctgctgtggctggcacagtttgggctctggattccatcttggcctccggaatttggatcactataactcagggtgtttttggagcggggcggcggggggaggggggctctgatagacccatggtggtaaaagttcaaagcagaatgcaagtttactagttttcaataggaatcgttagtgctaatgccccagagtggtactcccgctagctccatgccctccctaccgggtaagtagctgtgaaacagagggaggtggctgatcctaattgtctgtgacattctcatcaaactctggtccacccacctctactccagggagattcctgccagctggaccaaaactcttgtgtcaaccgtgtcagcatcacgatgcacacacctacagatgctcgctcgctcatctttacagcctccacaaagaagcaggaagggaacaacttccactagtaagtccgagggccgaccgaggtcaaccctgtaatttgtggcttgacagagaaagcagccggctctcggcccatctggagatcccagggaggaaaagtctagcaaacttgggcagcttctgctgctgcacagtaggtaacagaggatctgcagtggaggccgctctgacgcactcggcttagccgaccagtgagcacattcgaatatgccatgtgtactatagagcatgcatgaggtaccaaggtccaagcccctgagcagtgtgggtggggccaggagagaccaatgaatagcatgatccaaccagagaaagcatcacagtaaatcccaggccaggcatagtgtggctcacgcctgcgatcccagggctcaaaagacctgaggtggtgagccaagagtttaaggtcaggcttggctacatagcaagtttgagggtggaccccatgagaccttgccgaaataaaattcaaactgcatcttggctattacaaatttcaaatttcagatgactacgttcctgtctgtgttagctacttttctgtcgctgtgataaaacaccatgaccaagccaactcatagaacaaaaaagtttatttggcttcaagtccgagagggataaggcatggtggcaatgagcaggaagcgagagctggcttcctggatgcagcccttgggcatgcagagagaaaggcaggaaaccgagagtaccgaaagcggtgagaagcttttactcggaaagcctgttgctgtgatccatccctctagccaggccacaccagcggttctcaaccttcccaatgctgtgaccctttaacacagttcctcatgttgtggtgactccaaccataacaagattttcgttgctactttataatggtaattttgttactgttatgagttgtaatgtaaatctctgtgttttttccgacagtcttaggtgcccccggtgaaaaggtagttcagctcccaaggggcttgccacctacaggcggagaaccagtcataaaccataccaaacagtgccaccaactggtgaccaagaattcaaatgcctgatactttgggagacaggtctcattcaaaccaccacattgtcttaagttttggctttcttgccctgtttgttttgagtagggtttctctgtgtaacagctctggttttcctggaacttggtctgtagaccaggctggcttccaactcacagaacgccagcctctgcctcctgagcactgggattaaaggcgtgtgccaccccttgctctaatggctgcacaagactgaactgtgcgtgagcccagtccatgagttttactgtgtgtgcccagcactagagtcctagtgggtgtcccttatcaggtagacgtctcttctgtgttgagagaaacagaaaattttggtggagccacaaagtcctgagagacaggcagagtctgtttcccgtcctcactggtgagggctgcctggtgtgacctgtctggctgttgggttgttggtctgtctatcttcatcgctgggtactgcgcagagcctgtactgctgcggctctggggtttctcggctgtgctctgagctccggccacaatgctttgcaagcccctcatggctccctgaacccctcagccacagggcacccaatcatctcatatccctggcactgggtctggaaacatctaaaattaaaagttctttccatcctggaattcttaacagacctgtggctctcaaacgcaagcttgctgagagcagaatgaacctggcaggtgggatgtccaaagggttcaaagccccgtcccttaactagattggacctgaaatggagatgatttatgtatattttgaatttaaaagaattttgtaaagaaaaaaaatcttgcatgagtttttggtttaattgcctggcagggaaggaaatcccaacacaacagtgtggaagtggggcgtgaaaagcagcaagtgaaacggatttatgaagcccataaataaaaatgaaactcattccattgtccaaatcgagtggaaaggcacagtctaccccggttccgataaatggcaggatggggcacacgtaaggtagagagttctttccattttaataaagcaagacaatgggtgtaacataactgagggattaaaaaaaaaaaaaaggacatttcactttgccagacatgaccaaggaggcatgatccccatgcctactccatgggggaatgtacttttccaagaagaactaaaaccaactgtgtattcagattgggctcaagtgagcttggcggaggtggccatgttagagccgggtgagatgaggtgtcggcagcctggaggcgtctgtgtctgctgctctgcgtttgtgcctctgacacaggtgcagagatcttagctgctgctgtgagcctagcctgtggcctccaacatcaggtcttattcttgggttttgtttgatttagagaggtttgggctgggtcattctcagtttcccgctaggtttcctttagacaagggcagatgtcaagccggttgacccaaattaggggaagtcactaggcacagagggagagcgtgcgggtgggcttgtcaggggagcaagcccattggccgttcatatccacaacacagggccaaggtcctaccttttccactcctctagcagcaaccccaggatgctccaagaaacatttaccccaaggaaaatgggaagatttgcttgcaattgtggcttccagaaataggtctgtttctttaagacaaggtcttgctgtgtagcccaggctgaccttgaactcacaactctgctgctctgcccagagtgttggagtcacaggtctgtgccgttacctctggccagagcaagattgtctaaccatatttctttgaaaaatttttatttaaagtaaatatatatgtgtataatatgcatacatacatacatatatatacatatatatacatatatattatatgtgattatgtgtttacacatgtgccatagcccacatgtgggaatcagagagcagctggcagacatttgttccctgcttcaccatgtcagtcctggagttatgcttaagtcatcagtcttggtggcaggtgcctttacccacagagcagtttcacaggccccagacaaacttttaaaccctcccaaggagactgccctgacagttgctgtgagtagaactttggaagctaccacaagggtgccaagagcctaaatgtaacctagtggctaaaccacatcttcatccatagctggcttggagctcccaattttcctaccttggcctcttaagtgctggaattagaggcacggaccaccacatctggaccctcaaccaactctttcttatctatgcataatgcaggcttaacactcaggctgaaccagagagtagacgtagattctcctccccactatacacgccactgagatgttccagaaacatcttacatctttctcactctataccctaggaagaaaccatccctccctgggaaattctgatgttctctccagcatccccaccttgaggagttaaccccacatcaatgtagacaacttgattatttaaaatttttcaaagatttatgtatttattatgtacacagtgttctggcacgtatgcctacacaccagaagagggcactaaatttcattataaatggttgtgagccaccatgtagttgcttggaattgaactcaggacctctggaagagcagccagtgctcttagcctctgagccatctctccagcccctcctatttaaatattttttgtgtgtagatccctggagtttttttttttttcttacttagtgtttaatcgtgattaaaaacgttggctctaaagagtttcttgcttagtaagaacttaataagaagaactaaaattaccacagcaggaggcactttactgtccagggaaggtcccttcacttaagtcagcaatattcaagaggaatctacactgaaacaggacccaaagtatgctcttgatattacccaaacaccttaactgacagggaaaattgagtgcattttctatgtgcaataagacgatctgaagtgtccatacattgtagaacaaccaaaatctagctaattaacgtacacatattagatcatgtggatattttagtggtgaggaccctttattctcttggcattgtatattagcacagtgataacgtcatattggaatatactatatgttgacctcttgaccttctttgtcctatctaactgaaattttgtgtcccgtgggtcagagcgatttgactgcagggaagcggcttcccaagtgtttgcttggaaaccacgctgctgatgcgtcagtcatgtgagctccattaaagaagggtcatcactaagacaccagcatctgacttaggaggtgggggtcagtctggagtttgctctgagatctgcagagcctcctctctgcactgctacttacagcgtcttcacagcaagaccatccttcagacccgctagtgacgggcattttccttctcagatggttagtgtttgcctgccaccttgacaggatctagactcacctagggagcaaacccctgagcatgcctgtgagggcttgcctgggttggtttgactgagatgagaagacacagcatgcgggtgcatgttgtcattctgtgggctggggtcctagggtgaacagagaggaacaccagcatttgtctcccctgcttcctgactgcgggtgccatgagactcggactccagcaccgtgtgtttcccaccacgatggactgtacccctgaactatgaggccaagaaaaccctccctaaacttgttttggttggatattttgtcacaccaaagagaaaagtaacgaataccacctcctcaccatcccgggagagacagccctttccaagcacactattagaaagaaacaaagggaggcctagagcccctggaagggaattggggggtctcggtctgatttgctgaggtagacttaagcagctccttcctgaccaatgaggactctcctgctatgttccctacaaacagagaataaaagaaagaaactcacccttcaaatgaggctcacctctcctttgagtagctctgacaccgtgagggggaaatccagaaggagaacatttgaaaagtttacttcaggttgagcatttctaattccgccacttttgtgtgtgtgttgttgtttgatggacaggacagcatctcctcattattatggaaaatatagggttggtggtaattaccatctgaatacgaaagggagcagaagtgggcatagcctgcactggcctttctttgacaaggtataactttcttctgaatttctgtgttaattaatgcttatttaaaaaccactttaattggtagtaaacacctcaactttttgtactcattaaaatgcagccattgatgtgtgatggattttttaaaaaagcttaattaactttccttctgtatatataacctataataatgacaaacatattgggaaaaaattacccctgcctttcccctctctccctacccccattataaagacacatgatgtggcagccttacttccctaggaccagacgccagtcatataggattttggaggagaaaaccaaagcttttcagtctttggtcatttctgagccacatgcatgtctgctagggaaatttttttttttaaagtaagaaaaagtttaaaataacccatactccagaagactcaagacttgagtatttttcttagaaaacagcagatttcaaagacattcttagaaatctctcccagggggaattggctataatcatgtgggaccaagaaacacataggtggcttttcattgggagacgggactcctcaaaatcatataagcaccttagagaaacttcggagagtaggaagtgtgaacgcaatggcctcaccactctcacacaattttggaactaatatttcatagtttcctttgtgctgtttgtctgtaagggacacaaagttgccaagcagtgaaacacagcagggttagaggggaaccaagcaggacaccgttgtgtacttcattcaccgtggtgaggtgactctggagaggccccaagagagttctgcattgaagaagggcaaagattttatatggtttagcaggaaaagtcggggaagctctgctggtttggttatcgtggcccaagatggttcttggtcgttgtcatcagcttatcacaggaagtgtaagtgtttcacacatgacctgtgtgagcatcagtgtctttaggcagagcaaccatattcacctttgggagacctccagtgaatcaggaggtcttggagggaagagggaaggaaggctcacaggactcatgatgtcttcccagggtccccaggtagctcctctcctccccaagactatgtatgagataaacactgggaacactggggatgagattctcaagtaacgcagctgctgtcagtcagacatgttgctggtgaggtgtccctgtgatgtggctacctttaagtcacaggttctcctgtaaataactccagtaaactcattggctcaccaagctggctttggacaacattctttctttggtctgccaaggccccgtatagaatgaagagatctttctttatgtctctccaggaaatctgtggtttctccagaaggatgagagaaacagatgcagaaggcaaacctcacaaagaaagaccacagcagagtatttccagtcacctgtggtctcttaccacttagtcaccagaaataccaagtctcatcagttgatcgtttttagatttgtttactcctccaaaatgacataaccctccctctgatttagtttccgcctcagactcactgcctaccagagtttcccgtgacttttgctttatagtggaacatcagtcatttttgagtgagtgactgcagaagggtttgtgactggagaaatcactagagcaggttttcaccccaacatctgactcctgagtctttattggtaaatagaatgatagagacttagtcaaaatgtacatttggtggctactgctgagctggtgctgatgggaccagaaatccccccaggccactgtctgagcaggtgggggtgctgactgcaggcctccaggagcagatggtagttaaaatatcaatagattcagatgcgaccattaagtcaacagaaaaacaacaagaagtaatttgaaaaaagtgtagaagtattaaaaaaatcactacttagagctactcattggtaacattttggcatcttgttctcctacccttttctttgaatactattgattttacagaagttgagatcatatgtctggcaaattttgggtcatgtcgttcaccagatatgtcttacagcatttctgtaagctacacaatgatctttgacaataccactttgcctaacatagaatgttctgtgatatgtaaggtgttcattttggagcagttcagctattgttgagcacacagatcttttccagcatttgcctttggaacaggaattctttcagaactggtggactcttttattgtatattggtcaggataagctaagtcatgatctgcagcaaatgacaccaaggtgtcagtgcctttatataaacgagtctcttcccacacgggcagctcttcccagtgggtgtgacctcagccatactgccttgtgggtgttgtggcagcttgatggtaaggcatggtttggggattgctgcatcttgactttgtcactgtgactcagtacctgagcacaaagagctcatttggctcgtagtgacagctgcactgcactactccatggtttcttggcccttttgctttgggttgtgataacacaggacattgtggcaggagtccatggcagaggaagactcttcacagagttgttagagaaagaaggaaagggaccaaggtcccaatatctctttcaaggaaacatttctaatggacttctttctgtggggcccctactcctgaaggattttccaccagccaaaggcaccatactgagaacccagcctttaacacatgggctgggctccagatccaagctctagaatcacggggtacatagaaaagagtgctcttttgtaagtcatatgcaggtagagcctcttggtcatggttaggtctgtggcgcccccatcacagcaccaggaaatagatgctttgcatgttccaggaggagacctggccatactggtgacaattgcacctacctgaatatttaaaaaaacaatcttaaaacatattctaaacacagtaattagagaaaagcaccattattaacgctgtgcaaacagtattggcaaataacgagtcaagagcatctattatacaggctttatgtttcagacagaatttgttgtttacaaatacacgaaactgttccctgaatggtgaaaacaactgcgtgaaattaacctgatgttgccagggagttagggaagtggtgggatctgccttttattgtcagatgcaaagtcccttccttaaagggagagtgttaggattttcgctgattgtgaaaggacagcaagaagctttcagttttttgtgcccctctactaggtccacagtggacagccagaaactctgctgctgaccaaagatgccaaggcagcatttaggctcagctggggagctcagggactccttccttgaacaaagcagtaggcactgcactaaatgctggtacttccggcctgtgtggaaatggtggcatcagtctccttcagggacatccggtgtaggacgtggacttgcctgtggtgggtgaagagcacagggatccatgacttccttttctatccctgagcctagaccacgcggtggccagttagcctggcctctgagtatcactacaggctgtctctcccatggaaaggacgcgagtttgaaatgcttcttcattacgatggatcccctcagcagtcaccaagtaccagtggtgtttaggaagctggggggacaagtcctgtctcctttggcatatccaaagtggggatggcagcagcgcttttctgttcctctacatatgatcaaagaaaaatgtaaaaattacttttgagtgtgtgtgtgtgtgtgtgtgtgtgtgtgtgtgtgtgtgtgtgtgtgtgtgtgtgcgcgagcgctatacaggtgcccatacaggccaaaagagggggtcagatcccctgcagctggagttaaagcgggcactgggaaactgggaaaagaatacatttttttttttaaaactgctgagcaatctctagctcaaaacatctttttcttttttgaacccacctcaggtcaactttcttcttcagttctctcaggagaaatataagaaagaccagaagaatcttcaagttcatccactctcagccagaatccaaagctggtttctctatggcaggcgtggcccacacgtgcaggggtagttgaggaccgagcctcggtagggcctgtaccgacaggctgtcaccccgtcttccccgttttcatgcctttcctgactcccctgatgtcctcattcctgtgtatacagcattttcttagaacagtggctctcaaccttcctgactctgtgaccatttaatacagctcctcatgctatggtgggccccgactatagaactattctcatggctacctcgtaactgtaattttgctactgtgatggatcataatgtaaacttcttcttttttttttttgagatagaggtttgccaaagggctcgtgacccacaggttcagaacaactggcttagaccttcactggcctgcagtgggtagcaaaccaagggtcacagcagactgggggctgttgtcaatgtttaaaaagagtgaagaaaactatgaatttccctcaaaagaataataactgtatttcctgcttatttttttctgtccccatctagtaaatatgtagcaacgggttctataaaacattttatgtctgggaacccactgagccgcaggtgttatcgtcatatttaaacacaattagatgcactggtgggtgctgggaagccgtgtttctctgctacatgatacttagcccatcatcagagacctaatggctgctcactggcacgaggctcctcctgtcctcctcagcacgcctcgccccagtccccagttgcccatggaaggggaaaccctcagcagcagccgatcacttacaaacgcgttcgctcctcacgtgcccccgtgctccatgctagcatcttaacctagtgtggggccaacatctttagcatcctttgttcttggttattctcttgcctaattttaggatgtagataacacttggcaacaccaagacaagtaaaaatctaaatagattacagaattttgcaaagttctccaggcagttcagcctctcatgaagatgataatgatgcgtaactactccagtcacagacaaagactgacctggacatctggtaaacctgagttaactagaaatcaaagaagagaacatagaagcttgtaggatggctcagtgggtaaagatgcttgccttcaagaatggcaggctgggttccatctccgggacccacggtaggagagaagatgggagtgaacggtgaccccacgggtacttttatattgctgtgacaagatacccaacaaacatgacttgaggatggaaagatcgagtttggcttacagttacatcacagtggggacatcttggtggcaggagcttgaggcagatgctcacatgccatccacagtcaggaagcagagactcgtgaatgctgctattcaccttgctttctctttttaactcagtctaggggatcccagcacatggtatggcatagtccaggcttgggttgggtccagttcacagacatgcccaggcgtttgcttccatgatgattttggatcctaccaagttgacacaatgaaccatcacaggttatatttgagttgtaagaactcttgagttggtaattggagatttaaaacgtgatctgccatagaattttcctcaggtcaaaaatggagggaaagatggaagagctcacaagaatgtcacatgtcttctagccccactgtctctttggagattaagcaggatgaaaaggggtaaaagctttgcacaagatcccattgctgtgatgaaggacagggccagagcctgtccatctctcccttccactcagggccatgcttagctctcttctcacgcccactccacacttcacagcagcaaatccctcaggcttctttcagaacccttatgcccttatgatcccgaccgagtctcactcacccatcctcctgcactgacacagtggcggttgagccagtctcccacagagtcccctccatggggctgtcactgatgctctttataaatagatctgaaacatcttccctctctgtttgaaccttctcatgtcttctgtccccgagaacaagattccaaatgcacactcatatttgttccagtcgtgctctggaaccagtcaggtggccattggtagatggttgggtaaggaaaatgggatacatatgcaaaatagcattttgctcagttatgaagaatgaaatgatactgttcacaggagaatgggtgaaacttgagacagtcgtggtaaacaaagtaagacggacacacaatgccacctattttcactcatctgtggaatcaaaacttttctgttttgagtcataaagtaaaaggaggactatttgggaagattaaggggagcaccacaaagggctggcaggacaaagtaatgatgtccatgaccaatgcaccttacctacaggtatgaaaatgtcatccctgaaaacaatgaacaagcaaaaacatacaagacctcactgaggttgtgaggctcaaccaagttgtgttcctaattcagcttggggggtacctgctgcttctacactgctgagctcctttaagtcctaaatgtgctctctgctcatgcccagatcgcccacacacttccagttatctttacatgtccccaagcatctgtttgaaatggcaccctaacctgtcatctcactatacttaatttttctccctgtgaaagtcagttcggacttcaccttagatggatctctatgtttacctggcttcctgcgatcctggtggtttgtttgcttgtttgctgtcagctgtatcttttttgtttgcaagccatattccaacattcacacttgtcacagcagctgaagctaaataagtaaggcttgaataagcaaagaaataaagacattactctttataaagaataaattacccgctctataccaaggcttcctataagagtgtgtttcaaaagtctgagtggctgaggattgcatgcttccagcttagcactcaggagatgtggaggcagaaaggtgtcaggttccaggccagctgtgctaggtgggagttctagatcagtctggtctacatggtaagaccctgtcttgcaagtataaatagcatttttgcagatggcccatctccagggttctggccttcctgggcagggtttcctctgcaggcatgggccagtgctgccttcctcccccacagtactttgccagggaggcctcatctaggggggtcactggccactcaggtacccacttctcagtcccttgcttgcgcctcaggtctccatggatgctgtgcaccccacactcacatcttacacgtatggaggactatttcttctcaagacaagatctctgtaggtcgggctggcctggaactgctgcccctcctcactaggcgctggggctgggacacaagtgtatgccaccagaattttctctttcagattttcagtttagaatttaggttgcgctcttttcatcagaactgacttcagttatttctgggctttgggattcttttttcttcccttcttctcctattttgtggccagaaggagcagggaaaagttgcgtaagtgtcagacttgcagtgaaaagagaaaactgaattcccagtggcatttgctttcatgctgtacagtgcatgtgtgatgtgcatgtgtgtgtgtgtggtgtgtgtggtgtgtgtgtgtgtgtgtgtgtgtgtgtgtgtgtgtgtgtgtgtgtgatgtgtgtgtgtgtgtgtgtgtgtgtgtgtgtgtgtgtgtgtgtgtgtgtgtgtgtgtgtgtgtgtgtgtgtgtgtgtgtgtgtgtgtgtgtgtgtgtgtgtgtgtgtgtgtgtgtgtgatgtgcaggtgtggtgtgtgtgtgtgtgtgatgtgcaggtgtgtgtgtgtctgtgtgtgtgtgtgtgatgtgcatgtgtgtgtgtgtgtgtgtgatgtgcaggtgtgtgtgtgtttgtgtgtgtgtgtgtgatgtgcagtgtgtgtgtgtgtggtgtgtgtgtgtgtgtggtatgtgtgtgtgtgtggtgtgtgtgtgtgtgtgtgtgtgtggtgtgtgtgtgtggtgtgtgtgtgtgtgtgtgtgtgtgtgtgtgtgtgtgtgtgtgtgtgtgtgtgtgtgtgtgtgtgtgtgtgtgtgtgtgtgtgtgtgtgtgtgtgtgtgtgtgtgtggtgtgtgtgtgtgtgtgtggtgtgtgatatgcagtgtgtgtgcattatacagtacatatgtgatgagtagtacatgtgtttttgggccagataatggagacttgggcagggaagagacactctgatgttaaggtgctcatgatctctggtggctttcattttgaaagtctggaaaacaaccaaagactaaggatgtaaattcgtattggctggaatcagaggaggagtctgtgggttgtgtcaggcatggagatggattcagcatagccaggagccttgtagtcaggcaagagcttaagctcatgagtgctgaccctgcacaggcaggctgggagggctactgggagcagctgcagctcagggaacaggccaagtcccccttctcggggcttagtgtctgctcacaggactgcttgaggtgaccccctcacctttcacaagactctgattctggggcatttccttgagtttcagggtcagccagccttaactcatttggtggcaactgctctgggacattcagctggagggaacactcccttcaggctcccggcacttcctccccagcaacctggactcgggagaaggaagactccgaggtatcccggctgcagtgagaaaaccacctggccctctgctcaaaccacagcctgatggaaagatgagtgagcctccgcctgtcatctgcagaagcaccccagccctccacggggaggggtaatgacgtccaattttacacacttcagatccattagtagcaattacctttcccgaggtgttttgagtcagttttaacatagcattcttacagttgggggataatgacagtaataatgtacacaacattttcaagtcactgtttttagcgcaataacaccattagtgggtctatttaacaggcatattgcacactaaaagttaaggtgttcccgattcccctcccttcccccacacaaacccttcaccatgcttctattcaggggagattttctactccagagtttcagggtgatacttcctaccctcagtttttctgagggtgtcaacggcttgacttcaaactgttagctgtgccgctgttctcatttagatgttttcttcccgatgggcaagccagctccagaacccaactgtcatgagattgggaaatacatgtgttctgcaaagttcacataggccggagatccatgggctgtgctggctccttcaaggcccacagactcaaaaacttcacagggagaaagttttcagagatacacgagactcctctagtcagccgagctgtatgtgcgtctcaagataacactccagaacggtgttggtggtcttggagtgagagccatcccccacagtccccagttggcagtgctgttaggaaggtttaggtggtgaggccctgctgggggacagaggtcactgcaggtgagagtgacttccaaagctcgggttgagaagcaactgctcaactttctgtttcatttccagccgccatgactgcagcctgctgccatgcttccctgccatggtgaattctaaccctctggaagcctaagtccaaataaacccttccttctataagctgattttggtcacagtgtcttatcacagcaacagaaaagtgttgtcccttgtccttacacacacccctacctcacttcccttttgaagttgtatctggtcacctgggagaagccctttcttgtattcactttcttccaccaccaccttttaattgtgttgctctgtgtgtgtgtgtgtgtgtgtgtgtgtgtgtgtgatatcaggagtcttccttgatgtttttccaccttattcattgaggcagggtctctcagttgaacacagctcactagtctaattagtgggctagccagcttgctctggggacctcttaccccacctgagtggtggccttacaagtgggctgccaccccacctggcatttatgtgggttcaggggttttcaactttggacagcacattggtttggcactttaacccctgtcttagtcagggtttctattgctgtgaagagacaccatgatcatggaaactcttataaagaaaaaccacttaattgggtggcttacattttcggagttttagtctgaaaaaggccctttgttccaggcatggtcccaatccagtggtgtgattggaagtggtagggcctagtggaagaaagttgggtcattgagaccttgaaggtaagcccttgacaataacattggaccaggtcgcttataggaacatagatgaggggtcatttgttggagcatggttgctttacccaatgattacaccactcaagatgtctcttcttcccccagaaacctgtaatttgcctataaagcctcaggaagaggcgggcttcataagcccctcaccagtccttggcagagtgttgaagggcggaggcatgggcaacagccccttgtctgagtaaggctggcagccacacaactctatgggcataaaaataatatttagaaggcagtttgatggactccatgtatctgtttattcaaataatagtagtagcttccacacaagggcctgtgtctctctaatctgcaggatttgatcaggtttgtgaaaccaggcatgaagtcccggctgtgctgcaggcctcaaacacaatcaggaagccgttggttacatctgcaataactgtgccactattgcagcagaggtgccttcgtgcctggcaggtcagcagcgcagctcgcagtggagctgtagatgtctgttcttcccttgcagcctgcgtttcatttcctgtccctgtgaaagctatggaagctagcgagcagtcaggagccagcagttcaatttgggcttcatttctctctgtcttgaaaccagagcatgtggtgtcttcagcaacagggtcttaccatccagaaaaaaactcattttaaccaactctttttccttttttaaaaagttagtttattttttacattccaattccaggtcccccctcctctcctcctgctccccccactgctctacaagagagggtaaggcctcccctaggaagtctactaagtctgtcccatcatctcttaactaactttgtgactgtagaaactttaaaacatgtttttaattacaccagattttcttcattaacagccagggagacactttggaagggcgtgtgggttacaggcccagtggctgctgcttatgtcatgtgaattgccccaaatgaggtgagaggaataatatgacctccagctcagtaatttttgttttgaatagtctggaacggatactgaggaatagaaagggttttgagtgatactcaaatttagtcaagagttggatggaacagccatcgcctccctcccccagcctctcccatcacccttttgaggtgtagaacaagagtggatcttaaaatgtatgctgtgtaattgctgtttgagtccagcaattcagccaggagcctcagcagagtcagagagctcttatgctattctatagtttcaatcacaatgattttaaatgatgtgataaaattctgagctgcctggggaaaacttgattttctgtttgtttttcaaagaatgtaatgatgataattttcaataacaataaatcttcattttaccccttgtagcaccacgtgtctttttggtaaaagtttaatgtcagttaagcttttttataaaaaaattcatctgtttattttatatctctgcctcagccgcccccatcctcccttctcagccccttttccccctccccctcccaacccccagtcccctcctcttccatctccatccagggcaggtctcctatgactgtcaatgaaacacggtatatcaagttgcagtaagactaagcacctccccatatatagctggctaagccaggttggatttttatcagaataacgatgactggttattctgtccactggttattgtccactggtaagatttggggagataagtctatttgttactagcttgagcaacacttacttaggaaggagtcttggtttgagtgtgaactgtgcccggaaaatttacttctttgaacacttaacccccagcttcttgtgcctcctttggggcaggaggcaggaatgactggtttgtcatggggtaggggctgtcggggtgggtctgaagttaagcctgcccctgctcccagcaccctctctgcttcctgatccactgagattcacacaggacacaccaaaagttcctgcctccacagatggagctccagttaccgtgtcctctcaccatggtggaccgtgtgtgtcctctggtcctctaaagttgaggctttctggtatgttgacacatcactgagaaaagaaactcgtacagaaagtccgttgcaaaacaccacacacttcatcataaagtggaatataacatgtttttttgaagtgtgctgtatcttggtgtattgattacaaatagatacatgggaggaatggttattgaaaagaattcttttctgttaaggtttgcatgatgcaccctgaccctcatgcacacatataacttccttttttaagtattttttttttattagaaacaagcttgttttacatgtcaataccagttccctttccttcccctcctcccctgccccacaccaaccccctaccccatcccctttctgttccccagggagggtgaagtcttccatgggggatctaaaacgtctgtaatatcatttggagcagggcctaggccctcccccatgtgtctaggctgggagagcatccctctatgtggagtgggctcccaagttcatttgtgtactaggggtaaatactgatccaccaccagaggccccatagattagccacacctccaatctgacatcctagttcagggggtctgtatcagtcctatgctggtttcccagcaatcagtgtggggtccatgagctcccccttgtttaggtcagctgcttctgtgggtttcgccagccgggtcttgaccactttgctcatcacgctttcctctctgcaactggattccagaggtcagctcagtgtttagctgtgtgtgtctgcttctgcttccatcagcgactggatgaaggctctaggatggtgtataaggtagtcatcaatcccattatcagagaagggcatttcaggtagcctcttgactattgctagattgttagttggggtcaactctgtagatctctggacatttcccttgtgccagatttctctttaaacctacaatggctccctctatgatggtgtctcttttcttgctctcctctgttcttcccctgactcaaccttcctgctccctcatgtcctcctctcccctcctcttctcttcgctttctcctaactccctctcccctccccgcatgctctcaatttgctcaggagatcttgtccctttccccttctccaggggaccatgtttgtctctcttagggtcctccttgtttcctagcttctctggcagtatggattgtaggctggtaattctttactctatgtgtaaaatccacagatgagtgagtgcataccatgtttgtcttttttgtgactgggttacctcactcaggatggtttcttctagttccatccatttgcctgcaaatttcaagattccattgttttttccccgctgagtactacttcattgtgtaaatgtatcacattttctctatccattcttcggttgagggacatctaggctgcttccagtttctggctattacaaatagtgctgctatgaacatggctgaacacatgtccttgttgtatgaatgtgcttcttttgggtatatgcctaagagtggaattgttggatcttggggtagactgattccgattttcctgaggaaccaccatactgatttccaagtatctggaccagttggaactcccacgagcagtggaggagtgttcccctttctccacatcctctccagcataaactgttatttgtgtttttgattttagtcattctgacagtagcaagatggtatttcagatgttttgagtttcatttctctgatggctaaggatattgaacactttcttatgtgtcttttagccattttagattcctttattgagaatttttcgatttagttctgtaccctactttttaattggattatttggtattttggtgactagcttcttgaattctttgtatattttgaaaatcatccctctgtcagatgtgaggttggtgaatatctttttccattctgtgggctgccattttgtcttgttgactgtgtccttcgccttacacaagcttctcagtttcaggaggtcccatttgttaattgtcgatctcagtgtctgtgctactggtgcaatgttcaggaagctgtctcctgtaccaattcgttcaaggttacctcccactgtctcttcagtgtggctggatttatgttgaggtctttgatccatttgacttaagttttgtgcatggcgatagacatggatctatctgcagtcttctacatgccagcatccagttgtgccagcaccatttgttgaggatgctttcttttttccattgtatagatttagcttctttgtcaaaaaccaggcattcataggtgtgtgggttaatattagggttttgaatttgattccattggtctacctgtctatttttgtgccaataccaagttgttttctggactattgtacagtgttgtgttggctatcctgggtcttttgtttttccaaataaagttgagaattgttcttataaggtctgtgaagaattgttcggggattttgatggggatgacattgaatctgcttttggcaagattgccatttttactactttgatcctacccatccaagagcatgggagatctttccatttcctggtatcttctttaatttctctctttaaagactcaaagttcttgctatacaggtctttcacttgtttggttagcattaccccaagatattttatgttgtttgtggcttttgtaaagggtaatgtttctctgatttctttctcagcccatttattgtctgtatacagtagggctactgatttttttgagttaatcttgtatcctgccactttgctgaaggtgtttatcagctgtaggagtttcctggtagaatttttcgggtcacttatataaactatcatatcatctgcaaatagtgaaagtttgacttcttcttttccaatttgtatccacttgttgtccttttgttgtcaaactgctctagctagaacttcaagtacaacagtgaagagatatggagagagtggacagccttgtcttgttcctgattttagaggaattgcattgagtttctctccatttagtttgatgttggctgttggtttgctatatattatataaaaataaatatatatttattatgtttagatatgttcatgttattcctgatctctctaagacttttatcatgaagggatgttggattttgttaaaggcttttccagcatctagtgagatgatcatgtggtgtttctttttcagtttgttttttttaaactatgaaatggtattttaattacatatcatgtgaaataataacagtatataataataatgataattaataataacaatagaaatcttagaaggaactttcagtttgtttatatggtggattacattgatggattttcatatgttgaaccatccctgcatccctaggatgaagcctacttggtcatagtggatgatttttctgatgtgttcttggattcgatttgacagtattttattgagtatttttccatcaatgttcatgagggatattggtctgtagttatctttcttagttgtgtctttgtgtgacttggctgccaaagttactgaaacctcatagaaagagtggcaatgatccttctgcttctattgtgtgagacactttgaggagaattggtattagctgttcttggaatttctggtagaattctgcactgaaaccagctggccctgagccttttctggttggaagacttttgatgactgcttctatttcattaggggttacaggtctgtttaaattgcttatctgttcttgatttagttttagtaagtgatatctatccagaaaattgtccatttcctttagattttcaaattttgtggagtataggttttcaaagtatgacctgatgagtctctagatttcctcagtgtccgttgtcatgtccaccttttcatttctggttgtgttaatttgcatgttctctcgctgccattttgtaagtttggataaaggtttgtctatcttgttgattttctcgaagaaccaactctttgatacatcgattccttgtattattttcctattttgtactttattgatttgagctctcaatttgattatttccaggtgtctactcctctggggtaagtttgcttctttttgttctagagctttcagttgtgctgttaattctctagtgtgactattttccagtttcttcatgtgggcacttagtgctatgaactttcctcttagtgctgctttcaaagtgtctcattagtttgtgtgtgttgtgtcttcattctcattgaattctaggaagtctttaatttctttctttatttcttccttgacccaggaatggtgcaattgcgcattgttcaatttccatgagtttgtaggttttctgcaatttgtgttgttgttgaattctatctttaaagcatggtggtctgataagatacaaggggttatgccaattttttgtacccattgagttttgctatgtttccaagtatgtggtcgattttagagaaggttccatatggtgctgagaagaaggtatatattcttttgtgtttggatggaatgttctatagatatctgttaaatccaattgggtcataacttttgttagttcctttatttctttgttaagtttctgtctggtggtcctgtttggtgatgagagtgtggtgttgaggtctcccattataagtgtgtgaggttttatgtgtgattcgagttttagtaatgttcctcttacaaacgtggatgccattgtattgggggcttagatgttcagaattgagacttcttcctgatggagggtttctcctgtgatcaatatgaaatgacctccttattctcttttgattgattttagtttaaagtctaatttgtttggtattaggagtgctaccccacttgtttcttgggcccatttgattggaaaatcatttcccatcccttacctctgaggtactgtctgtctttgaagttgaggtgtgtttcttgtatgcagcagaaggatggattctgtctttgtatccattctgttagcctgtgtctttttataggtgagttaagaccattaatattgagggatatttataaccgttgattgttcatttttgtttggtttggatttgttgttgttgttgggattgtgtgtggatttccaccccttttttcttttggctgttggtaaagagggattatctattgcctatgtttttgtgggtgtagttaacttccttgggttggagttttcctttctgtagggctggattaggcatatgtattgtttaaatctggttttgtcatggaatatcttgcttcctccatctatagttattgaaagctttactgggtatagtagtctgggctggcatccatggtctcttagtgttggtgtaatatctatccaggaccttctagctttcagagtttccgtggagaagtcaggtgtaattcttataggtttgcctttgaaagaccccaactcaaacccagcctgatacccaccagcaggtatttgaaaatcactctggcctcacacacagctctgggaaaaagaacacatgaaatggtcggtcatgatgaccagtctctggaaattgttattattactagtttccaaggaatgtttttatcctcaacaactgtctggtttctaaaaattgttatgggttactctgctccagagcacccaagttttgaaaataagtacaagtcactctgttcccagaaaaaacactagctgtcccatggccttgcaggtgtaaaaactaaaataacatttcaaaccccttgtgggcaaaattgtaagttcagttcccaaccaatcagtaaatgactcatgtatgttatagccaatcaatatgttgtcatacttctgcctagagacaaaaaagatataaaaactgcctgctttggaaactcagggtcattctcttctcagacaaagaccccaacgtgttggaataaaatccttttgctttgcatggagcttgagtcctgtgagtggctctgtggggtgcgtctctcggagttggatcgccttttgagctcaacacctttatatgttacttggcctctttcctttgctgctctttatattctttctttattctgtatgattggtgttttgattattatgtggcaagggggacatttctttgtggaccactctatttggtgttctgtaggcttcttgtactttcattggcatgtctttctttaggtaggaaagttttcttctatgattttgttgaatatgttttctgcacctttggaggatatcttcaccttcttctatacctattattcttaggtttggtgttttctcagtcttccatatttcctggatattttgtgttagggatcacctacctttgtgatgtcattctccaggcatcactgtctgccctgagatgatgatggcagcatgccatcaaacctccagaactgtgagctaaatagaactctcatttataaatgacctcaggtattgcgctattgcaaaggcaaaccaactgtaatacatgctgcatacactaaatggccttttgctccttttttctgcttaaaaagatgtctggaatctcactccatgccatgacaaatctatttctcctgttcttaagcaaaggattgcattcctgagtgtagatatacattctactgacgggctctgagcagtttccacttttgtggttataagtaatgaatatatctggaagaaaaatcttctgggacatgtggatgaatactttacacacactaattataatgatggtgtcataatgtatatttaatatcttaatgggtaaatcatgtttaaatgacttatctatgtctccaatgagtaattgtttagtatagccttttcttcacactcttatattggtaaaggtcaattatcatagttatcaatatttcagaaatatatacattttaaaaactgctgatttttgctaagctggtgaatatgaaaaccagatcacacggtttctcttttatttaaaaattagtttgggaaatggtctattttttcatactcaacttttttgtgaagatttatttatttatttatttatttattcagtttacaatgctgctgaccaattgactagggtttcttacttgctagctcagtcttaagtatcaaccataaagacttaccttataggacaccagctgcagtcatcttctcttgccaggatcacagagagcaggaggaagaggaagagcaagagaagacgatttcctgtttgtccttgcttatatatgagtctgcctgctatgtcacttcctgcctggatctcaagacttctttttactacatttctcagaatcctccttgactcctagtcctgcctaacttgcttcttcattggccaacagtgctttattcaacaaccaataggataaacatccacagaagcactttccccatcatctcctcttttctgtctaaacaaaaagaagggtaacttatcttttataataactgaaggaaactataaccataactatctgtctttaactccatcaaagaccacagaaggataatatatgaactctagaattgacagagacatctcgctacctggacagtcacccacagttcctctgtaacgttggggcatccatcttcagccataggccacagtgtgtctggcacacttctccatttcagcaggaacccttcagtactgtcttgttttgtaagttcagcagtcactttcttgtgagtcctgcatgtctaatttatacagcaacaaacagtccaggcaagagcagtttcttgcccaaatggctaatcttgccatgttgaaagcaaactccataacgagtttcttcgatgcccatcctcctttctgacataattggtgtgccaggagcagttgcgtctcactgccaagaaaaaccctaaatcatttaaatgccatatattctgtagggctttgaaaggtttgaagaatacctaaccatctcaaatacatctctgtatatctagaaaacctaactaacctaattataagttctgactattataggtaaaagatctgtataaacacaatacctaaaaaagaggagacatgtacatatcacaaaattaaccttaaggttgtatcaataaatgaaaatctataccaatgcaaagtattcattcctatatcctattcccccttttttaaaaaaataaatgactatgctcattatcatttatcatcaaccccatttaaatgaaaacaaacatttataaacaatatttgggaatatgggcgttgttctttctaaactgcttcctgctgattggggcgatgtccatacaccattaggatcatgataaaacagaaacctgaccaagtccttgtttttgtagtctgtaaggctgtattgtctcagcttcagggggtcttgcttgataaaaccatattagtctggaaggaatccacagcttttgattttctgtggaaacacaagtaaaaactttttttccaagtagcctgtccttagacttaaattctgaagtcaaagcattttaaaaatgtatgttggattgatttagcagcatttataatcaaatgtattttagtagcagtaattcttaacttggcaaccaaacaatttaaagacaacaatatggcataaagtatccagattctctgtgtattttccatccttatgtggctttttattactttatttgtactttcttttgtttcttttttcttgagacaggatttctctgtggaaatccacctgcctctgcttccttctctcacaagcctacatatatttttaaacgcagtgtaaacctttggaggtttttctttatctggatctgtctttatcatctcagaagtgctgagtccaacgcccaagagcatggagatggtgtgagcatatagaagctgctccaatgcctctcagcggcccgacagggcaggctgtggcggcaggtttccctctttcactgggaaccttggggcatggggtcatcccgctcactgacaccattcagcctggcgaggagcatgaacttgtaagaagacagacctggtctcaaaccctggcccacctcacgtctccatatccccgtgggcttgtgctgatgctttgctccaagagcgcccccccccccgccttcttgcctgtaaaatggcattagtaatgtgtgcttcagatggttgttacgagagccacacgtgatggctcactaaagccctgtctggtgtgtggtgacttcaggtcactccctcacctgcttgcagatgatgtagacggactgcctccagcaccatacagcaatgtcccggccctgctccctgttgatcatggacagttttcatttgtctcaggaacgtttattgaatgcctatgttccaggcgctgatgaagttgatgggaacatgaaagagaacacagatgtccctactcaggagaaactctgtgtgtgcattgtgggggaggggaatcagagcctgacgtcattggagagagagctttcttttgagtgtcttctcacaacagagggacagaaagcatggctcttctaaggacaccagtcctggtgggtcagggccctgccctgggacctcatttaaccccaattttcccctaaagtcccccatctccaagtacatttagatgattgtctggaatgtcggcatgactttgggtgagggaacaaacattcagtttatactgagtaggaagttgtaggtcagaagttcagttctttttgccagaataaagagcaaactcatttgttaccttcaggagagaatgagcatcaccatcatttgccgtatggaagcataacctgttaggaggattagtggtatttggtgtgggtggcagtggccatgtggcatctggtgtgggtggcggtggccatgtggcatgctctaggaggtttagatctcagagtaggcacatcctgtggggttccacaggtgatttttactgagttcactttaccatgaagggttgtaggagggaacaaccctaagctgcattccctgagtagggccactccagggctgttgcacaggtcacagggtcctggccttaggggcctattgaagcaggaggcccttcctgcaccagtgccatgggggctgcacaagctcgagaaaggggctctttctgatgtccatggagtactcattggctaggagccacttcctcatgggaaccctgcaatttgttgtgcagaggtgtcttggtgctcaggagaaattcctctcagcatcagaagttgctgctttcccctgccagtctgttcatcctacagctgctaaccccatgcctcttccctggggctactggaaggcatagaagtaagctgggtctccctctagcaggtgaacaaagaaagggctcctgcctgttttgagtgtgatgtgtggggagctggggccccctgagagttcattcatttgagaacatgatctgtgtgccctgcttggaatagatcttaacttgagttttggtttgcctactctgcaggattatggtaagtttgcaaagtttgcatttaatctgtgatggttaaagaaactcttattttatgcaaggcatccaccttggtacccactagccaattgtctttgactccagtccctggaacacaaggtcctagtcactctgactcagtgactcttcttccccactaaaatatacagccgtgactatcttttttggcttctgtaacttgcttatacagatacccaaaaattgttttgccttagccatttaacttgttagaacagagcaatgtttgtttagagatcttctcgtggttttctctttgaaggcccttccccgcaccccttcttcacagcacgcctgggatagggctttatgactggcattagctgcattctgctagcagctaatcaataagtcctttaattatggctgggttgagtctgtgctcttttcccaggggtcacgaactccaaatactgagtgtgggacactgtcccaggagcatggctgggcagagggaacagggaaggccctgcactcacaggcttgatgctaactagggagatgccacagaggcttctcaagtaaacagccaagagagcgggttgtaggttgggaccagtgttgggtttgaagcaagcatcagcattctgatgcttggagagtctgtgtgagctagggaaggagagtgccctgtctgttttatgtcaacctgacacagccagagttatctaaaaggagggaaactcaaccgagaaaatgcttccataagatccggctgtacacaagtctgtagggcattttcttaattagtgattgaggaggaggacccagcccattgtgtgtggggttatccctgagctggtggtgctgggttctataagaaagcaggctgagcaagccatgaggagcaagtcagtaagcagcgttccttcaaagtctctgcttcagttctgcctccaggttcctgccctgtttgagttcctgtcctgacttccttcagtgatgaactgtgatgtggaagtgtaagcgaattaaactctttcctctccaggtggcttctggtcatggcgcatcatcgcagccatagaaactgagacggaacgagcaaggaagtcagccgagaagggagatagtgagcagggtatgggtggggctctcaggtgcagctcaacagtcagggcaaaccaagttcacagtggctgccctgactgctcctgactgtgtgaagtcaaggagaacacgccgccaggcagccgagggaaagacagacatataggtatctgggcaccgtatggctggggaactccctctaataatgaaggtatgcatgtctccttccttccttgttggaagccaggtcttcccttccaggtggccctcagggcccttgatctgtatctcatgttggagctgtcattggagccctctctcttcaggcatgaatctgttgccaatctccaagctttaaaaatctagacccgtgccctcgcagtgcagggttcagttccctctccatcgagtcagcgcactgtggggcaacggccagcagaagggctttccttgaagacatcatactcaggagacactagagtcactgctggctgagagacagccctcctgacatcatgttctctgagcatctagaacagttggcatggttggaaaagaagggttctgctgaaggccgggagcccaggatgtaacaggtttctgcctccgtttccctagggatgccgtgagggaaggaaggggaactggcagagggactcaagaagagccaaggcctccatctcacctacaattcagtgccttcccttggacccgagggaatctacttatgactctattacccggtaaattaggagagtgattcagtcaggtgtatttatcatgaagagaactaaagataattaatatactgcattgaatgcaaattgtacccacagcacttatctcattttcaattagcacgaatgttacagcactgcaggcttgttaggtttcaccatgggctgggtaattaatttctgtgtgccacgtatcaggcaccggtaatgccgtttattattaaatgtcaccccaggtatcggtttgttagaagaggcaaacaaacggaatgcgcacttgtctgccctgtgcaaatctgtttttacacctcactgggtcttttcgattgtttgtttattgacttgctctaccactgagattgcaaccacaaacaaaggaagtccctccaagggcttcctatgcttcctcctcaggggcatcaggccctggggtggagatgtcttagaaaccatctttcccaggtgagtgattacagttctcccaagagctgaggtcactgggcctcagctctccacaagttggtctttggggagcaagaggttggacacgccctttcttggtgctcctgacacattcctctgtatgtggcccctgtcctgctctgactcttgctacctgctccttgcttcttgggaccctaacatgaggaggagagtaggacccaggctggcacctcagcataagtgaccataccataccgtggtgacagtggatttgttgttattgttgcatagaatatggagtctgtgagaagacagagcagtccgtaaggcgcctgctgagctagagtgaggacctgagtgtaaactcaggcacccatgttaaaatctcagtgtgctgtcacatgcttgtaaccccagccctggggaagcagagacaggaggatccccgggacgcactggccagctggcccagcctaatggatgagctccaggttccagggaagagagcctgtctccaaaacaaggtggctgaaacctgaagaatgacatccacatatgtgtgcacacatgtacatatgcacctgaacacacatgtgcatgcaaacatgtacaccactctacacacacacacacacacacacacacacacaggcacacacacacacacacacacacacacaggcacgtacatatgcatacacatagacacacacatgcatgcacacacacacctacatgcacacatggatacacacatgcatgcacagacacatgcacatgcatacatggacacacacatgcacccacagacacatgtacatgtacacatgtacacacacatgcgtgcacatgtacacatggacacacacagacacacacataccaacacatgtactccaggcacacacgggcacacgcacacccatccatgtacacacacaagcactcacaaacacacacatgcatgcacacatgcacacatgtatgcacagacacacacatgaacatgcatatgtacacacacagacatatacatacccatacatgcacacacaggcacatacacacacccctccatatacaaacacaggcactcacagacacacagacacatagacacacgcgcgcgcgtgcacacacacacacacacacacacacaccatctgcattgcatgctcctttctgcctgctgcttttgatgcttcaggcatttgcagagggcagtggcctgaagcttccttgccactcttgggatgacaccagtttgctatcactggctggtaaatactccattcctccagtcctccaagctgtgaccttggtaagaaatcagcactgttcacctggtatgttggagagtcccctagagggacacgtgtggagaacctctgtggccagctgagttaacatgctttcctgtctgctatctccactagtgggactgtagccgtgagttctgcataggagaaacgtcaatgtcatggtacggggaatggctggaggagcgtgataagccacctggcaggtctttgcacaccatatgcactagatgtgggtttggtgatttaggtaaaataggcaagccccggctgtaacgacgagcacattttactgaagttgggaaatggaagtaagcaggtacgccaggcaagttgaccaccagaagaatggtcaggcagctgactgacatgggtgctgggaacagaactggcgtcttctgcaagcaggaagttctcttagtcactgagaaatctttccagcgctgggtcacagttttaaacaaaccctgaagaagagccactctaagtgccaaaggccacctgaaccccttgactcagtcttgacagggaaacttctggcatttgccgggcacaagtggcttccttgtcatcgtcacttctgctgacttagggtctgtttccctcacggggagccacagacaccaccagcccagtatctgtctttctgctaacccctttgtcctgtgcccactaaaaacgtgtaggctttaacgttgttttaaaaagacatttttttttgtttgtagggcagttttaggttcgctgggaggtatgagtttcccatatggcctctcccccactgtgcatggtttccccatgaaggcagtctccttccagggcagtaggcttctgctagtagaactatgtagctacaccttagtcctccgggtctattgtctacattgaggctggcttttggcattgcacattctataggtctaagctgatgcatggcctctccccagcactgcaatatcatacggagtacttttctcactctgaaaattccccatgaggtagtttttagtcaattttatctgttgattctgacattccttcatttatcattttttgggctttgggtttactgcctgggtgtgtacagaagggcctcagtcttggggttcaggatgtaagttcagtatgggcttcctgtctagggtgtctaaaaacccaaattcagtacagttacagtgtgtgtgtgtgtgtgtgtgtgtgtgtgtgtgtgtgtgtgtgtgcatgtgtgcgactgtatgcttgtgtgtgtgtgtgtatgtgtgtgtgtgtgcatgtgtgtgtgcgactgtgtatgtgtgtgtgtgtgtgtgtgtgtgtgagagagagagagagagagagagagagagagagagagagagagagagaggagagatctttccccttgggaacatgcatttagtttagaaggaaccagagcacaatcacagagaaaaaccaaacacaggaactgtgcagtggaaagggagcgtatgctaacacttcttacaggtcgtggatttttatttgttaaacagaccagagggtttctggcttttaatgttgttaagagaatggacattaggaaaactctttctgtttcctctgctgtcagttccttactgctgggccatttagccatctaaggtgcaatgaggacaggatcttttatttacttaatcattcaatcatctatctatctatcatccacctatctagcatctatctatctatctatcatctatctatcatctatctattatctatgtatctatcatctatctatctatctatcatctatctatctacctatctatcatctatctatctatctatcaatcatctatctatctatctatctatcatctatctatcatctatctatttatcatctatctatctatcatctattatctatctatcatctattatctatctatcatctattatctatctatctaccttctatctatctatagatcatctatttatattcgagacagggttcctctgtgtaatagctctggctgtcctggaactcactttgtagtccaggctggtctcaaactcacagggatcctcctgcctctgtctcccaagtgctgggattaaaggtgtgtgccaccaccaccagtcgaagataggacctttgaatgaagagaatccttgatcttagatgtctggcctctcgaaatgtggggcaagactggcaacatctaattagatgacagctcagcagggccaggcctgctttctttgaagaggaaacatcttggtcaactcagcatgtggttgtaagattagtttcaaagggcctctgtgacacctgtgcccttggttgccatcttctctgtaccttctcctgctggttgtgccaggtgtgggtggggtggggcggggtggggctggtacaagctctttgagaggattcaaagagtggggcacccacatgctcacgcacagagcacggattcactgtattcaagctctctgtggccccaggttcagcgatgtgtgaccacctggaggtcggtctgatatggaagggaaggcccgggcgggccaggggctctgacagcacctgtgttcttcgctcagggtctcattattgctctccaaggaccttgagctcatctaggccatccccacccccggcacccagcacacattgcaggcctgtgttctcatgaatatggatcccatcatccctccccgtagggaaagatgttgggggcagagctgttgattacatttccagccaatcattgcccattaagaggaagagcctgggcattatgtctcttcagcgaggagccatttgcattctgttgggttgggcttgctttctgggcatgcatgggcccttggctctcaattactcctgcatccgctcctcctctgtggtgctcttttcctctctaagggtcctgattggattcaccaatgagctttgtgttccttacagctgtgtagcatgttcctggctagaggttgggaggccatcaggaccaggaatggctggaacaggaaacaaacacctttccattccctttctgctctctctccctttgcccttccttgcaaaggaagaatcccatcttttggagggcacagccccagcagacagtggggtacatgtgctcccatgctcacccatccagagttctttgtctcctacccccactctctggaggtgttggcttcctgatccctctacttgggacctgtgaggtctggtgtgtttcctctatctaccactttcctttctagaaagaggggctaagtagatgcaaggccagctttgggcaaacagcctgactgtataccccgatttccagcagagaactggaggcctgacccaggcctcaggcaggttcataccctagttcacagacccccatcttcaataaagtgtgaagacaaccgggaatgacagagagcctcctgctttcacagggctgtgttatttttaacccccttctgctgcctgtgtttccccggaaaagcctttctctggagtcaccaacatttgtctgctcttgttaaggttggagccccaggctgtcccctccacccagtcaccagaatgttggctccgtcgctttccctttctttcttcctctccaaggagatggaagcgaacatctctgacatgtagagaaagggagctgagcgagatgaggcagcaggctcggaacgatccgagcccgataaaggaaggttacctgtgtgtttgtcaacaagatgaaataaataagagcaaaaaaaaaaaatagaaagaaaaaaaaaagacagcaggcagaggcaatcaaatatgtatttaattaaagcaaacatagaaataaaagttacatgttgaatcaataaacagcacttttttctacatgcattttgaacaagacagatcagaatcttcatgatgaagacataatgtgtcacaataattaggaacacagacaaaagaagagctaatcagcatgcaaatgtatgcggtgctggtaattcagaggacgcagattcctacctcttttttgcttgattcatcttcattgctaatcatctgaaggctgccaaatgttcagtgacactaatgtattataggtcaagagaggcaggtcttcacctattaccccccaaacaatatgcttcccttccctgcttcctcttcagggctttcagcaatcacggccagatgcaatcagactccttgaataggaacaactgaggcttgtttgtggctgggcttcattagaatcaggaggctgaagaaaggaataaattacttaattgcacaaaaaacttgcagccaaagtgatggtgagagaaactgattgtgcggccccgcgccgggcactcttggaatggggcgtcttagaatagctggtagtttggcctctcagattcagacagatttgggtgtcctccagaccagatggctccaataccatccattcttccctttgtcaggtcccaccgcttatttgatcttggtccctctctgatgctggttgtattggttgtaacacaaatatgcattcagatcatatccattgagtctggcctctcccaacttttgttctccaccccacacttttttttttcttttttgtttttacaaaaaaaaaaaaaaaaacttctaatttttccttttgagaagatgatcaagttgaattaaagccttgttgtccaacttttgaatgttcgcacagcgtccaggaaaaggaagattgcacgggctggcgctagcttgcatgaaggcattgctgacaggggaaagcaaagaaagaaaagttgcactattcgccaaccgcctggctatgtttcttacctcccagactctaaatctatttgttgtttttaaagcacattactaaccagtgttgttcttacagaaccaaggaaggagaaaatagacaaggcaaagaagtccccagtcaccattttttctcgggctcagtggcatgtccacccagccactgagaccctgactcacacattcctctcaggggttttggtcatgtgcccgacttacgggtggtcctgagatattgaagaaaagacttcattttctctgggaagccccttagctgtgtgctgggggggggggggagagactggactagaacaagaggcccaggcagggaagaagttatgattgtgttgtatctgaaagcaatggtgatgcactcagaagcagggggctttgctggtccctggaaaaaggattggccaggctgattcacccaggcctctcacgccactctcctcctcttgctttccctcctgctcctcccacctaccgcccgcctccccccacccagatcttcccaagccctggtaggttagattttagcatcagtcccaagtcctcaaaggagaccactctatcctccaaagaccagagagtagtcactcttccccttttatctgtctctaccatttttgtttcctttgcagctctcacctctggctgagattcatcttaagtattgtttatttttaactcataagattttgtgcccatcgtccctgttaacaaggcagaaacactgtctgtttcagcactgttttcccagacttagtaagtggccttagtaagcattccaggagtttttgttgtttgaacaactgactaattttatttttgtaaatgtgatcccatgtagcccaggctggcccatgtggcccaggctcattctgaacccctgatcctcttgcccccacctcccaagtacagaaatcacacgtgtgtggctgccatgctaggcttatgcagtactggggattgtactcagaagctcgtgcatgtgggcaagcgctctaccaactgagatgtgtccccagtttttaaaaagttgtttttggaacttttgctatctggctgccaaatgtcatttaccatcaactctgtcgctcaggttgtgttttggttccagaaaaccataatataagtttctggagcctaacaccatggccactaatgtatgtgtgagtttgcacacacacgcatatgtgtatgtacatgcatgagcgctaatgtatgtgtgagtgtgcacacacacacatgtgtgtattatgtatatgcatgggcactaatgtatgtgtgagtgtgcacacacatgtgcgtattatgtacatgcatgaacactaatgtatgtgtgagtgcgcacacacacatgtgtgtattatgtacatgcatgagcactaatgtatgtgtgagtgtgcacacacacatgtgtgtattatgtacatgcatgggcactaatgtatgtgtgagtgtgcacacacgcatgtgtgtattatgtatatgcatgagcactaatgtatgtgtgagtgtgcacacacatgtgtgtatgtttacacattcatgagcactaatgtatgtgtgagtgtgcacacacacatgtgtgcattatgtacatgcatgagcactaatgtatgtgtgagtgtgcacacacatgtgtgtattatgtacatgcatgagcactaatgtatgtgtgagtgtgcacacacacgcatgtgtgtatgtttgcacatgcctgttattgcagatgtgtatgtgtgtacttatgtgtacatttgtgtgtgcacatgaatgcatgtttgcgtttgatgtcctatgtgtgtctccctgtgctgtcctgtaccacctgctgcccaatcatgaatgttaggcctcgcacatggaccccacatgggctgagaagaagtaaactccagtttggtcttaggaaacacagacctgtgcaaactgctgataccaggagcttggcagccaaaggggtcacagagacaaaggtccctccctgtggttatcgttccctttcagatgctgattgcatagaagaagctaccaggaaccgagtgctccctgacccaacccaggacccaggacatggcacaagtgtccattacacttttggggaggtgacagtgccctttctgtcaggcagagtgtcacttaggccatataaaacaaataaaacagcacagggttttctttttctgcaagtaactgctattgagataaaaattgtagctgtgtgtgtgtgtgtgtgtgtgtgtgcgcgcgcacacacacacacatgtgctagggctcaaacccagagtcttctgcatgccaggcaagtgtggtgtaagtgtcctcagggtttgttgttctttcctggtcttacagtggtagtgactcttcttccaagagactctaccttacccccagacttcgggggaccctcacacacacaggcattgggaatggagagttggggggagggtgccagtgaaccattcagcagtaggtatttgttccatgtggaactggcagggagcaggccggagcaggccccagaccctctaatcccttattgccagggtcccagctccatgccaaaaactcgacttttggagaatggcagtcttgggggaggttctcatctccataggaagccagcaaacagcatggacagcgctagatagagtcttctatagccagtccagggccatctgattattccgttgatggttttgtttttttctggtccaaataagcctccaatcttccactagaacaaagccgagcatcccactgcccggctggcggagttggccgtcttaggcttcttaggatgatctccgtggttacctttctttcccctttccttagatctttttgtttgtttgtttgttttctttctcataaaataagaaagacgtgcctctgtgccttggcagacagctgtctgaggtccttcctccgtgggggtctcaccgtgggacccccgcccctcccagcagtgcaggcaacaaaaactcctcctgcttggcctttcatcaggaaggagttgctcccaagcttgcatgtgaaaccctggcatcctctcaaagaaacctggggggaggagggttcaagagggaggtggctttgtgccgaaaatctcccctcagccctcctcgccagcctggctgagggcctcccaaggggcccccgggaagtagaagcctcccacactgggcattgtgtccaccctggctccttagaccttacttcaaacagcccgaagaaagagattcccatgggatacagcagaaacctatcagactctgcttttacccatctgagctttggattagcttcgcctcgcttcccgtcagcccccaagttagctcgtgactctacttgcgaatgccctaaccaactggcttctgggtttcgtcttaggtttgtgttcctttacacaagcgggcatttacggctgcactctgggaaaattagacaatggagccactgtccttggggatccagaaaggagagaggatgtgagcactgaactgtgtgtatgaaatggccgagtgtctgtggcttccctgacgatccagggagaagatatctcttggatgggcccatctccggcagagccatgtgccaaagggttgggatctttccactgaggttgggcaatggcctcacccatcttgggctcaaaggaagaggaattgttggcaaaaccaagctggtgaccactgaggccagcgagaaccaccaaaagcccttcatatgtcactcatgcagggtggtgccagacttagaaggctgagaaggaaatctccagaactcataggatgagagtactgtctgctccccactccaccacccacacttttccagggtaggtgagcagtgagaattccatgacacaatcacccagctcttgtccttgaatgcttcggttccttgaagacaacgtctcaccatagccacagcttctcttagagaaggctgcagaagcaagaggagatcagctcacgagctagagaagccaccagaaaagccacataagagcatggtattccatcccggtgcctagaacaggaagagggaagagatggtggggcttggtgtcttactgttggaagaagacacacaatgaacgagacaagcacccagccagttggtgctgtggtggaggccagccggtgacctcgtggctgctgatgtgctggcactgcagatgcccgagcgatgagcatctctctgttggagtgcagctaatcaggagaattcatgtctgagaagactgctcttcatggtctctaccacccctctcactctgaaagtcttgcctgtcagggttgagccaagctttgtgtagctgcccactcttctctgcttgggagagacctccaggtgctgctcctctcggttgtggttagacgcttcgccttgatttgaactggaaacctggcagaaaataagtattaggtggtgtgggcaaaactgtttttatttttaaaaatttcccatttatttatctatttgtgtgtgtgtgtgtgtatgtatgtgtggtgtgtgtgtgtgtgtgtgtgtgtgtgtgtgtgtgtgtgtgtgtgtgatgtgtgtatgtgtgtgtgtgtgtgtgtgtgtgtgtgtgtgtgtgtgtgtgtgtgtgtgtgtgtgtgcacacgtgcgtgcgcgcacccctgtgcacatgtggaggccagggggcaactcacatggaactattaccatgtgggatctggagattaaactcagtttgtcaggcttggtggccttaggtatggaacaatctcactggccattcttggaactgactgagtaaaatggcattggcttagtgctggcttgggatcaggagaagcaggaggtggagagacatctgggggcctctgggactagactggggtgtaggtgcccccacagtgctgactgtcactccctgcaggccacgattcctgctgtgacttgattttgagggagtctgtgaccgtttgtgtaaagcagaggtgacagcatggtggttcctttgttcaggcacggggcctgtcatcatccgggattctctgaagactcggaggaatttggcagtggacgagctcctggccctctgacctcctctctggctgcagggccaggacaccttgttttgacatcttttcattctcctctttgtgtttcctgtttccctggctcttccctcctgctgtacttttcctgtgtctgtttgggtttccagatgttgcagctactggttattttggtaacgatctgggtctcacaagatatggggaggtggtggcagggggtgggaggaagacaatggaaaaaccctatattggggaaaggaaaattccatatatgttttccaggctggataatgggctggaggcatggattgaatattgtcacaaagactgactgcggagtcaagtgagacatagcaacttcgattaaaatgtgagctggggagatggctgggtcagcaaggtgctcattgtgtaggcacaaggacctgaatttggtccccataatccacatagaaatatgggactttgtggtgagtgcttattgtcccagcactggggagggagctgctggaagatctcaggagcatccggccagcctagcattggcatcggtacagtcaatgtcagaaagcccctgtattaaaactcaaggtggatggcttcctgagagatgacactcaaggttgatatccagcctccacacacatgtgcacacacatttgagtggatctgaacacacgtgcacacacatatgagccaccggacaaagactcaaaacaaaaaaacacccccattttttctcacttgccccttctccaagaacacaggcttcagctctgggccctccctatgggtggtccttaggcaatggggattcacggttctttttaatacctttgctctgctacttgccatggctttaaaatagcccaccaatacagcgatccagtcaagtggcagtagagactatcttcctctgtacaaacagataaaagatgccacagaagacatatgctgttctgatggggactctaatagtcctctggcagaggtggcgatgcttgggaacttggcctgcatgacgcctataagaagagtctctctagttaattctgtgtgggccagctcctgtaggcaagtaaactgttccctctgacaccatttagtcagatgctctccaggtggctgtggtgatggcacagctaagccgtggatgacctgttatgataaatctttctgccaaaagccgcctgatccccaccaccatgtgtgagctttacgccagccgcctgcctgagttaggcccaaatgaatacacagaaacttgtattaggttcaatgccgcttggccaatgactaggattctcatctgttagctcagtcttaactatcataaacctatatattttataagacttatcttattggacaccttattggtgtcccttcttgctggtggatcacatcgtgccgctagagcaggagcggaggggaaaagaaggatgcttcctgtttctccttctttaagtatgagtctccttgctatggcacttcctgcctggatcaccacttctctactacatttcccagaatcttctttgactcctagtcccctctaacttgctgtctcattggccaaacagtattttatttaacaatcaataagataaacatacacagtacattccccatcatttcctcttttctgtctaaataaaagaaggataacttatcttttataataactgaagaaaactataaccataactgtctttaactctatcaaagatcagagaaggataatatataaactctagaattgacagagacatctgctacctggacagtcacccaaagttcctctgtaacgttggggcatccatcttcagcccatagaccacagtgtgtctggcacacttctccatttcaacaggaacccttcaggactgttcatcttgttttgtaagttcagcagtcactttcttgtgggtcctgtatgtccagtttatacagcaacaaacagtctaggcaagagcagtttcttgcccaaatggctaatcttgccatgttgaaagcaaagaagaaaaggtagctataaccatcaaacaaaaggaatgtgccatatggcaaactttacagctgtctctcagagaactctatttctcttcatttcctagtccctattcaattaaaccaatgctggatttagaggtggatttggctttcctcctctaaaatccaagcacgttatttaactaaactttagtgtttctgtattgtatcaagaagccaattgatgtaatacagaataaaagaagaatttaggaactgtctttgtcttattttggatctttctctcaaggtgtacaccctctcataaatgttatgctcccatggttgcattccccagcatgtgtacatacacaagcaaacatttctctgctaactgtttatgtttgagtcccacacagccaatgaagacctgcctgacagcaatccctgaacaccctggaaagaaaatgggccacacctcctcaactgcactggatccaacttgatccatttcaactgacactctggccagaggtttgggtactgacttcaatcaagttgaggatttcaagcgagatcttcaatcaagcgaatcccacctaacatggactggatacaatccattcaagacttttactatgctaacattttcttcctacaggaccccagaaggctatcgttgtcccatttcagtaggaagtaacttggaggatgctatgccaccttttcccattgttgtcatttaggatagtgtatagacctagttagggatagcttcctattgtttatggttgggattggaaggaggtgttcaggcttggacacctcttccaggtgactttaggatttagttaaaatagatagttaggatgtgacataagcatattgttgtatcttcttatatttcacctttatgattgttaattttggatactttacactgttaagttttaatcctcttttacactaaaaggggaattgtaggggaacctgtagccatgcctgctcaggggctggctacaggtctgcctgaccatgcctgcgaggatgtggtcagggtgatgtagagtatgaggttcagggctgcgtttcactttcgtttccctttcagcttgcatacagactgttgccacgccggctggctaggtcgctctgtaagtaaggcttttccctattaaatacccttatatttctacttggctccgtattggtaatttcccactttaaggacccttctctgtagacagtgtcttctgtctgctggaccatgggctgcactggtatccaaagtctggcttcagatggctttggcaggcaggactggagcctaactgtgggtgtaaaagaactcacagagaagatgcaagctcctatggattgggcagaggacataagacatggtctgagagaaactgaaagctggatgaggtgaactttgacccaatagaaagaacagtgggctgggattcaggctaggcacctcctacccagacctgtcctggtctgcacccagactcctcggcctcagagggagcatccaatagtcttcccagccacctttcagacctatttctttttttgtgtctcaccgtcacaggtcacaaactgataattatactttagataaacagcatatttttttaaaaagtctttcttttgttctcctgtgacaaagaattgaaaaattctttagctttctttttttagagacaggttcataggccccaaacctttgacttcctgtctcaggctcccacgtgctaagataaaaggcatgtgccaccatgccccactgaagaatcattattctgtggtttggggcttatttaagtttttatttttgttcctagagggacttgtgtaacccagggacttgggtggtggatggcctaatctcactgtgtagctgaagatgaccttcaatgtctcacctttcagagtgctgggattaccaccacaccttgtttataccatgtcaggtatagaacccttgaccttgtgtgtgcaaggcaaatactctaccaactgagctacccccccaagcctggaaataactgttcctaaatcctggaatggattatattaggagtgttccaggcagttaatcctactcagagtctaccagacatcagtgtagcggactgtagaccacacacatacactccccaaacaaaagctaaacatatggacaactcagcattccctgagcaatatcccccaaacaccacagcctggtctactgaaggggcagtaaaaatcagggttaaagggcagagaccccagccactcaggacttaggataaagaggcccacttctgcagtttataaacacacacatggataccacaagagtccccatggatcttggaaagtttgcttgaaagcttttgcttatgcctattaatatataacaaatttgttgttggccatgaaacacacacacacacacacacacacacacacacacacacacacacattaattactcatgtgaaatacatatgtagtatgtaagtgagggcatgttggaagtctacagtgtgatggtgtcttttgaatgtcagttttgccataacctagaattatgtaggaagagagtcttaatgagtaattatattgaccatgctgacttgtgggcatatctatggcagattgtcttgactgttgaggtaggaagacctcacccactgtgggtggtaccattccctaggcagggagtcttgaacgatattagagtacagaaagtcagcagcgagcaggcagcatgggtgcatttgttactcgctgctcttgacggtgggtatttgagctcctgacttgactttccttcaccaatggactgtggcctagaaccgtaagctgagataaaaagccccttcttcccccaattgcctttggtcagggtgttttatcacagtgacagaaataaactagaactgaagggattgtgtgcatgtgtgctggtcctcttgggtattggtgcgacacactcccaggagatataatgtgaaaacttctgtgaccttggccactgaaaggcatggcttcatggtgcagctccctgcaagggctctgttacatgggcgttaaattattctcactttcaaaatgtatgactgagtcttgaagaaatgcacaggggaagaaccaaccatgatggccatgttcactcatgcaaactgatgacggcctcagtaaaatgcacagttaagggtctggtgatctcaaggggctagctaggtggtggaatgtttaccctcgccagatgcagaactagggggagtgggccctgcacctcaaatgggcaacacagtagagctgaccatgttgacagaggtgtgggtgagtcaactccaagaacatgagtttgagagatgggccctgccccctatctaccatatggtggtgtggacaagggagagaagccccctgcatgccccctgaggcctgtggcaggtgagagagctatccctgaggtcactagaacaagagagctggccctgcctctcaccagctgcaacactaggcagagtggcccctatgctttgtctaggtaacacagtagagctggccctgctagtgtaggtatgggagagtcaaacccagggcatgggagcaggagaattggctctgccccttgctgcttaccacatagggcaagctagttgggtggtgctggagggctcaccgtggtggtgaggatgaaggagagctagcaggctgaccaacccagcagccaccctgacccagaaccagagctaggagttggcccctcccgtcatgcaccccatctgtgacctgctggaacacgcgaaggggctgtttctgcagacccaaagttgcaggatctccatgacacaggacaacaagatatccaagaggagtcccagtgagggcccagtattaacgatgtagcaaaagccagagacctcaaactagaccaactacttgttgcaatgaatacttgcaagtgatgatatatggaccaggactgtgtgacttgctgtgtcatgctacagcttccaaaataagatttctctttttttcttttaaattttattttgttttatcctgatttttttgggggggtttgcaagggtagagggggcagataggaagggatggggaggtgagagggatcgagatgcattttgtgaaattcacaaagaattaaaaaaaaagttataactgaaaaaaaagaaaatgactgatctactcccaaattctcattatgcagcaaggatcctgaagctgagggtggtatgttgacttagtcagtactccaggatagatagtggtggagagagactaaaatcaaggttgggaattcatatatatgggctatttgcactactgtggcaggtgctaagtgattattaaatacttttgtatttgttgccaaggagaccactgggaacagagatgctcccaaccaacaattattgatgaggaaggtgtaagattagcgatgaggtgaatcaaatgaagtagaatctgaggctggaacggcaacttagtggtcatgtgtaaggattagagtctctttattcaagaaaacaccagggcaaaacacaggccagagctaggttatagaacccagcaagcgcggccaggacaaaaacgggccagggtccccacgtgcagccccttaagaagctcccttacctcaccccggctttccttcaccacacccggtcatgtttactggttttgtagaggacccaagttcagtttccagcagccacacgatggttcacaacctcctgcaccttccgccccaggagacctgatgatgccttctgatccctgctcacacatgagctgcattgcgtggcttcagactctcaagtcggataatttcatttgtagcctttttgtctctccaaccatctcatagtttgggaaggaatagggaacacatcttaactcacagtaggactcaagaattctcactcaatcaggctatgcaacacagcagtgagtgtgatgggagctgaggttggagttgaggccagaagacaggttcgagccctgcttttatcatcagcaagctgtttggtcttgggtaggtcccctttctcctctaaccttggtttccacttccataaaagacagatattattccaactgatagatgccagccgtgggcaccctgtcagcctctgggtggcaaggtggactaggtagtcagatgagctgatttggtctctgtgggagcggtcttaccgagttatcatgagatacgatggcatttctcccagcatcgtgattactccggttaatgagtttagtgttgttctggtgttgaccagacccagatgattggttcctggcatgggatgtgaatctattttatcattccaacaggtacttgccgagggcctgctgtgggtcaggcattgtccagcaactgggatggcaaacacagtaccaaatgcacccagtctttccttaagcagctcctggtcctgtgggggaaacgcagacagaagtacacaacagaaggcagtggtaagtatctctgagaccactgggtcagggcaagacgccactgtgggctgaggcacacatgcacacacctaggtgtgtggcacaaatgtatgagcacacatgtcactcctgggaaagcctccctgagaagcagatctgaatttacaagaccgagctattgtttggggaaaggaccgagttcctagactcttggaaacgttatgcttaatagtaaataaggaattatgaatgtgtcttgggcataatctgttggggttcctttgcttttctgctgactcctgcatcaagcccagaggcttcactggacctttctagcatgagccatatgcttatctcatctgtgcttgccgcctcctgcacgaggtgtcattctggccatgcttcagcagtctggcccttgctggcctctccattcctgcctacttctttagctttctttcttaaccccattgacttcttgtttctgggaattagcgatatacttagattacagacctcagagcttacactctctttgtttctccttcatctgagttggctttgcttcctcatcaacgcaggcaggactgagacggtctgtgtcatcaacatcttctggattccctgtggaaatcttccacagtaccaagtgtatagcagacgtccagtaagcccatgattgccaacgaatagtggaactattttcacctccaaaagaatagactggggtgtctggggagatgcttagttggcaaagtcctccatttttgagccaaggacctaaattcagtcttcagaaccactaaaaaattgggtgggatatacttttaatcccaggacaggaaaggttgagacaggagggccctggggcttcctggccagccagaccagcctaaattgccgaaatctaggccaaagaaagatcctgtctcaaaagataaagtatgtggagcccgaggaataaaatgtatagtgtccgaggcgcgagtgtgcccctcccaacacacacacccacatatatatacttgtattcacacataaatgcacatgaacctgcatacatgtgtacccatggatgtgtgtttcctgcaactgcagcatgtgtatacacacgtaaacacacatgaacacgcacctggatacatttgtgcccattggcacacatgcatgagacacactacttatatgtgagttgactggcggtaagctccgtgatgaactataaacagcggcacagactcctcccatgcagacgcggtgcctgtttccctggccagcccttgaatctgggttgccccgtgagacattctgaaagtgatattgtacaggttttggcctagaagctttgtagctgctgaccttaggctggaaatgcttccaaatgatcaaccccacaaggtgagcctggtgcaagatgagaagctgcatgaagatgaccctggccatccctcttatgatagaaaactggttgagtccagtccagccagagagttcctcagctgagcctggcccgttacccagccacccaactaggagttgaatatcatggacatagtttcccatttgtagttcagaaataacatcaagtgtgttcagggtcccatagatacggggcttgttttagcctctgctttgggtgtctagcagtgtgtgccgttaagagtactctggtggagaggcaaagcaatgctcaaggagtgacctcccatttttatacttcatccacagcaggcttcagtgctctcatgcccactagctcttcaggtcttgtttttaagtgtgtgtgagcatgttcacatgtgcaagtgagtgtgcatacaagtagagggcagaggtcaactgttgctccttgggctctatcctccttggtttttgagtcagggtctttcattgcttggagcttaccaagtaagcctggctggctagccagtgagcgccatggtattgtctccacctccccagtgctgggatcacaagtgtgctctcatactatctggcgttttaaatgtggatttttaggctcaaactcagcactttgccaggcgagtcacctgccatgcctacgttttgtccttgaagagttttcagaggacccaggctctatttccatattagaaaaccaaggctcagagagctgggttcagaggaggaggaagatgtaggcttaaggccaccatcacacaggtcctgggacacagggtggccttcccttgggaggagaggggccagcagcagggaagagagctgagcccgaggccctcactccagccgcctgctctactgagcctgcaccccagaccaggcgtccctccccccaggtagggcagctgtgcagcctcccaatgaggctgtatctgcacggcagctcccagagcttcagctctgctgcaggaccgagctgcttctgaaggcttctaattcgaggtcttaatttttgtaaagcgtgaattacaagaagtcagaagaaggatgcaaagagcatttaataatgcacaccacaaaagaagtggtgtaactacattaattaggcaagtcttgcgtaaagatgcaatgtaattatatatttgagacagttaattagggagctacttggaaatttcagtgaatattaaggtaattatacataaatactataaccattaagactgcacccataatgaaagcaataactaattacataaataacagcatacttacgtttttacattaccaacacctaacaatgcttactcgcccctccctccaccatgcaaatgacaaatcttccatttttaactcagatattcttgcaaatggcttggaacaatgacctttccccccctttctctctattttgacacatctgggcctgctgtgggctcttcagtgaatggactgaagcagggaattggagcctcaagcctgtctgcctccacctgtgtggctttgggtgggagggaaccagggccacacagtgccctgactggtgagcggtgagactgggccatgggcaggatgaaggtcggtgcctgggagagcaggactgagcatcttcagcagctgaaccaccttagagaaatctcaaggcatcaccaagcctccatttcctcttgtgtgaatagagaagtcatagtgatgacatcttccctgggctagaagggagtgtcaacacgcaaatgtcaaatgccaccctggagctggtacagggttgtgtttgaaatacacaaccacggactccggtgccattgctccctctgtttctcttcctcctgtcgcaaacccagcaagctccctgcaccaccttcccagggaaaaatcgcctttacaaaaggatctggaccttgttcagactcaaatgacaggtgacaccaatagcccaaagggtagatgaacatgtgtttgtattttaacacgaaacacaaaaccactgcccctcttacagactgcctggtgagcaggcagttgagacggttggccttcaagtgtgtcctacgcacccttggtgtcttcctatggagacatttgctgacccacagaggaaggacagagggaagtgggcaagaatgtggaccaggagtctgagatgcccgagttaacctgagatcccttccatggctagctcctcagcccttctaacagtgataagatactagcacttattgagcagttagtatatggcaagcattgttttgaggatttcctttgattaagttttaaaggtttttaaaaatcagtatggaggtttctcaaaaattaggaatcaatctacctcaagactcagtgataccactcgagcatatacccaaaggatgctcaatcgtaccacaaggacacttgttcagctatgttcatagcagctttattcataatatccagaacctcaaaacagcctagatgcccctcaacagaagaatggataaagaaaatgtggtgcatttacacagtggagtattactcagctgttgaaaacagtaacattaggaaatttgaaggcaaatggatggaactggaaaaaaaatcactctgagtgaggtaacccagacccagaaagacaaacatggtatgtactcactcataagtggacattaattgtaaagtaaagaataaccattctacgatccacaaaccagagagtctaggtaacaaggagggctcaagggggggatgcatgggtctcccagggagggggagatagaggagatctccggttggattggggttgggtgggcatgggaacttgagggattggggtggggagtggacagagggaggagtgctgagggggctttacagagtcagtagaagcctgatgcaagggaactataagtctctaaggatggccccagctaagactcctggaaatagtggacacatagcctgaactggccatcccctgtgattggattggtgactaccccaattgtcagcggagagccttcacccagtgaccgatggaggtggattcagagacccatggccagacatcttcccctctgtgctgatttgtctggctggagcttagcctgtgtggtcttttcccgaaatctctgagttcatctatttagcggccctgttgtgtctggaagacactctttccttcacatcaccccaccacctctggctcttgcagtctgtctttctgcctcctcttccttgaagatatctgagacctgggcgggagcaagtggtggggggatgtggtaactaggtcccatttaggactgaccacacctcagcatcctctgtgtgttgactggtccagggtctcagagttcaccgccactcactgcaaatcaggttcttggatgagggctgagagctgctctgaactatgggtacaacactaagtcataaggagtcattttaatactatgccacttaacagattaataactctggattctcccttagaaactatagcccacctatcttggttcttggtccctttaacagggccaggtatgggttccacgtcacggagcgggccttagatccaaccagagggtgtctgggtaatcctactatatttgtaccactattatacaagtgagcatcccttgtcaggtaggttgctactgtagcttgcagagtccacagatgggtgaggtaaaggaccccttccctcctccagtactgtgcacagcaccttccagaacacgaaagctagccagtagggatgaaatttccaagtgagtaccagcttgatttttttttaatgttttgtgactcaagtggtatctttcatgtggtatcttcagcattggggtcttacactgtcaagttctgcaatggggtcttacactgtcaagttctgcaaggcaaccaagagcattggcgatagtctgcaacgcttgggtgacgatgtgactctaataactccaaaagaggtaactcgttcctagcactggagcttttatttgctagcatgaggtgtttaattgggtcatagtcctcctattataggaccacttcccttttatatatgtatatgcttatattttatgcatattaaatctctttttatatgtgtatgtttagattttaggaagcttctacaatagttgggtttcatgtggcttttaatagtgttagtcatccctacccatattccctccactaccctccccttccctcccacccccacccctgtttaacgctcctgttccatttattccctttagccctctatacagctgtgttccatctcccctccctcttaagacccaccccctccatgaccacctgacctctacaggtgtgccaaatagagaatacatatctgaagatcttaagaaaaacgtggcatttgtctttctgggtctaggttgcctcactcactcagaatggtgtttccggtttcgtccacatacgtgccgatttcatttttcttaacaaccagataacattctgttgtgtaaatggagcactctttcattgtccgccatcagctgatgggcatctgggctggttcccatcttctggctattgtggatagagcagcagtgaacacaggtgagcggggagctatctctgtggcaggacacagagcctttgggtttgtgttcaagagtggcacagctgggtcttgtagttgatctacttccaggaacttcccgactgagttccacagcggttgttccagcttgcattctcaccagcagcaagcagccttcccttccacatccgtccatgccagcatctgctattgtttgtttcatcagtcttgatggtgctgactggggtaagatgaaatctcaaagtagtttccgttttaatttctgtgaaggggaaagatcccaaagtttttagttttaactttatgctatgtgcttggatgtcttgactgcaaaaatacaactcatctgtttgcatttctccttttgagaactctttagatccatgctccatttttaaactggtttgtttgttttcttgatggttaacttttttgagttctttgtacattctagataccaagccctggtcagatggataactggtaaatgtttttccattctgtaggctatctctttatttaaataatggcgccttttgctgaatagatgttgtttggtttcatgagaacccatttatcagttgttggtcttaatgcctgtgccgtgtcctgttcagaaaggcctttcctgtgccagtgagttcaaaactactccccattttctcctcatcagacttgaggtatctggtcttatgtcaaggtccttgagttaatttaattgtcctgatactcttacaatggaagtcgtgtgaagggggcatgtggcattttcatctggtaaaacggagccacatagctgttaagtgactcatcccaggtcacacacaagaagggacacggctcgggtctgaatgtcaacatttgcctctactacctgaattctcatttctttaatagttttactctctatcccaggctggccttgaacttctgatccttagctttcagggtgctgggattacaagtgtgtgccaccacagacactgagtatttttgccgacctaaaccttttttcccctttattacacaaaggatacaagaaaaattgttgttggtttgcaagagaaaaacagctcatgcttcattgtggagattagcagcatttaaacatcttcataattagggaaatatgtagttatttatgtaaaagtgtctgagtaattagcataataatataaataaaatgccagctttcaaaacaatggaaatatgaagctgcaaagagaactttactaatctcagaggaaggaagacagaagcggcttggttcccacaaagggctgaagagagagagagagagagagagagagagagagagagagagagagagagagagagagagagagagagagagagagagagagagagagagagagagagagaggctcctggcccaggatggagcttatctcggctcccacttataggacaagccgagttagtaaggacggccagaagctccagagcatgcagaatattccccactgaagtgtaaaagcaatcttcagcttttccaagctgaaccaggttcttgtagatgcaataggagagctacttactgaccctggctccctccctcctccacacacagcaaaccctgcctggcacacttgccgaagattaaatgagacagtgcttggcacagtctctggacagagagagtgcttactgagtattgcttgggttgaatgagtgactttggctggacttgctgaagggtcatgagaaaattcagaaggctacaacatgtcatcagtctttatcccaaggtttctcttgtcagattaggactgcagatcactttggctctcttgggccactgttcttttgtggtgctggctggctttaattgtcaacttgacacaacatagaatccccacaggacagagtcttaatgaaggactgtctatatcaggctgacctataggtgtgtctgtaagggactttctatatcaggctggcctgtgggtgtatatgtaggggtctgtttagatcaggctggcctgtgagtgtgtctataaaggactgtctatatcaggctggcctgtgggcatgtctgtagggggattgtctatatcaggctggccggtgggaatgtctgcagggaatggtctttattttgctaattgatgatgtaggaggaccattttggtagcctgtcccactgatttctgatgagggtagcacatggccactgtgatagcgtaaggcagcaaagagaatgaggatagaattagacttggtggcactttggggtgattcaaggcatggtctagctgttgagatgacaccccatggtccctgcctcaggtttgcataggttttggagctttagcatagttcaggcaggacccagcctgcagtctgaagctaatgtttaccagacctttggaggctccatggctggtgagccgaatggaaatctccaggtagtttgtagctgttttgtttgaacccatatttgcaaacctgaaactcttttcagatgtggaggtgtggaccatgtgcagacaacagggcctgtctttcagtagtttttaaataaagttgaaaaaccagcctgtgccctttgtgtcaaagcctcttggggatcattgtgttggcggtcagggaggtgtggccaagggcatgtggtaagggacgctacagtgcaaataaaggcaggcacagtggctgttgcctgctgttctagagcagagaaccttgtcacagtaagtgtagaacttggttaattgttgaactgtttccaaactgcagatagactgactgtgccctgccctgcccttcccttcctggtggtgtcctctccagccctggctgaccactgggtgcactgatcctctctttccatcttcagagttaggacctggatggtgtggatttatactccaacggaagagaggagacactcttctcaaagtgccagcgatggcttccagaactcagagtggaagcaaggcttggtcttgggaaccgggtcattcttatgagtcctactagctgtgcaggtagggttaaattgtctagctcttctctgaggtaggagagaaccaagtgcaagcactgacatacaaagaattctgtctattaatattcattgccactgtgggctggaggtgctgagaacatcacttaagatttgtcttagggttctcttgctgtgaagggacaccaggaccatgacaactcttataaaggaaaatgtttaactggtggggctcacttacagttcagaggttcagtccattatcatcatggcgggacttggtggcatgtgggcagacatggtgctggagaagtagctgagagtcctacatcttgcaggcaacaggaactggtctgattgtcacactgagggaagcttgagccaaagagacctgaaagcccaaccccacagtgagacacttcctccaacaagaccacacctacctcagcaaggcacacctctcaatagtaccactccatttggggggcatttcctttcaaaccaccacaggattctttttagtgagattggtagttttgctttatatcctaggaggtggtgttttatttcactttgtggctggcactccacctgagtgccatagtgtcattgtgatccaactgcagggccggatgcttcttagagccatgcagggcagggaggagggggagagtgctgcctctgagtgagtaagaaatcagattgttataaagcagatgcttggagactcccctgccatgctgggttttacattttaaggatgacatagtagagttgggagaaaaaaaaaacaagataggatagttgaattcatagctgaaatatactttttaaacacacattttatttttagatatgtaaataatgcatattcactttagaaaatatttaaggctgaaagaaaaaataatacactctccaatcactcagcagtaccagagtttaacttcttgtacttcctttctgtgttttcacgatgtacacagttatgtgatgagctggttcatctatgtgtgtaatggttcacatacttttgtatacatggtcatacatacccatatatggaaatttgcactctatttggtaatgttctatagcagtggttctcaaactccctaacactgtgaccctataatacagttccccatgttgagttaaccccccaaccataaaattattttgttgctacttcataactgtaattttgctagtattataaattgtaatgtaaatatctcatatgtgacccaaaggggttgtgacctgcaggttgagaaccactgttctatagcctgttgtatatttattttcctgtagttaaatgtttcacaacccctttagagacaaagtctcagtgtgtagcacagtcattcctaatcgtggatctcctgcctcagccttctgggtcctgtgattgtaggcctgaactaccatgcggagattttttttttaattaatgaagttgatagggtggtaaaactttgactgctccaataatattatttataagattatattcaattaggcaaatgtacacattcatgttttgcaactaattctctagtgagatttctctacctcagtcctcagtggcatctgtcccttcatcgattcttgcaagtagataacagttctgggtttgaacacttccctgttcttgcctgaatgcagtagagacatatgaaatacattaaaacggagaacttgtcagcatgagcagctaaatgctgactagagacatagcatctataacagcatggagaaatttaaccagttaagtacaaattggctaagcaaatcttgaaatagtgagaacactctttgagctttcagactcccctgaggggagctttgtaggcaacatgaagatgatctgatcagtggtgtgcatgagtgtgtgtgtgtgtgtgtgtgtgtgtgtgtgtgtgtgtgtgtgtgcatgcatgtacatgtgtgtgtgcgtatgtgtatgtgagttgtgagtgcatgtgtgtgagtacatgtgcttgtgtgtatttgagtgtgtgtgtgtatatgggtgtgcatgtgtatgtctgtgcttgtgtgcacatttgtgtgtgtgattctgtgtcttgaaagcagagattccaatcgtaggagccatgtgatgggaaagtgttctggtggtctgtcgtttttggatagtcatcaagagcctaggcttgagtggctctgacagaacacatggtcataaatgagtgttgggtcccctcagcatcttcacaggacctcagaagcagccagcaaagtgtccttctcaaactgccagaagttgtgtccaggcctctgaggtgaaacaagggttgctctttgggcatgaatcttttcgtctgttttgggaatgtgtaccagttttttccattttccagcattttctgagtaggagtggactggttattgttattgacacatgaagagttgtttgtataatatcaatgttattccaagaggtgagagatttaggattttattttgtttttgttgaggagattgatcattttcttttgtgtcttgggagatagggggttttgaggagaaagttatggaggaagaagtaaaactcagcttcatgtacacttataatcccagtacacaggacacggaggcaggagatcagaaatcaaagtcatccttggctgcatagtaagtttgaggacagcctgagatgtatgggactctgtccaaaacaacaccaccaccaccaataccaccagtaaataccaccaccacaccaccaccaccaccaccaccaccaccaccaccaccaccaccacaccaccacctccaaccacaccaccacctccaccaccaccaccaccacacaacaaaacaccaccacccacccaccaccaccaccaccaccaccaccaccacaccaccaccaccaccaccaccaccaccacaccaccaccaccaccaccaccaccaccacaaaacaccaccaccaccaccaccaccaccacaccaccaccacactccaccaccaccacaaccaccaccacacaccacctccaccaccaccaccacctccaccaccaccaccacctccacaccaccacaccaccaccaccacctccaccacaaaacaccacctgctccttctcctgctccagcctgatgtaattactgaagttctgctctcctgctgaaatgcgctgatgtggaaaagtaaacatgttactttaaagttgagcctgtagtgtgtgtgtaagagagtgtgtgtgtgtgtgtgtgtgtgtgtgcaagtgtgtgtgagaatatgtgtgagtgtgtgagaatatgtgtgagtgtgtgtgtgtgcaagtgtgtgtgtgtgtgagaatatgtgtgagtgtgtgtgtgtgtgtgagtgtgcaagtgtgtgtgagaatatgtgtgagtgtgtgtgtgtgtgtgagtgtgtgtgtgcaagtgtgtgtgagaatatgtgtgagtgtgtgtgtgtgtgtgcaagtgtgtgtgagaatatgtgtgagtgtgtgtgtgtgtgtgtgtgtgtgtgtgtgacataggtaggtggctctgatctgagctgccatgtgtctctgtctgggtggacattatagcttgctggcttggctgatcctgagtattttggattcagctttcatagtcatataaactgatctctcaaaatcaacttccccatctcactctctctccacatatatattattaataaataagataaacaaattatatgtgtgatatatattacagctggtgatgggatgacacaaggcaggtctagagttgtagctgaaggaatgtgtagccataactttcaggatgtccttccaaggatggcatgacactatgttctatgaacttggcaccttcagcaccagcctgccgatgcctagcccccctgcctccagtgtgtgcccacacatacatacatgcatacatgcacacatacatgcatacacacatacatgcatacatgcatatgtatatccacacatatgcatattatctttgtcagggttttctgttgctgtgataaaacaccatgaccaaaagcaactttggaaggaaaggctttatttctgcttacagctctcaggtcacactccaccactgaggaaagtcagggcaggaactcaaggccccagcctgaagacaggaacagaagcagaagctgtggtggaatgtttttctctgacttgttcctcatggctttttcaacctgctttcttatatcatccaagaccacctgcccagggtagcaccatccaccgtgagctgggccctcccacctcaatcgggaaatgtgcctcaggctaacccacaggccaacatggtgaggcattttctcagttgaagtttcttctctaatgactctagcttgtattgagttgagatacaacaagccagcacacatgttgtatatgagataaacccaaagcctggggatgagattatctatgtactgttatgcctcacctcccctgacacctctgaaatttgggttacatgtataattcttccttttaagttattcccaagtattttgctcaaaatagtacaaaagtaactaataaagtgtctgacatttccccaaatattttaatcaaaatactcttcttcgaaagttagacacggacttccctaaagtatatatctggggactaggaatgagataattcagcaatatctgagttgcctctgatgtctgacaagctagtgaggggcccagcctgcttctgtctgcactgcactctgtacagccctccccaagccacagggcagttgcccaggtgggcagcaagacagtaaatgctgtgcctgaaactctgagggttggatggacacaagagccattgacacagcaaatacgtttccatgttcccgacctctggctttagagtacaatagagtacaaacagatttgaggtggaagtcatgaaagcgcctccaggttctctgggctggatgagattcaggttgcatctggctttacctctgctagagtggaaccggcttcaagacagtgggcatcttgtaatctcacatcaaacctttgtgtttgtcattaaatatccgccagcatcactgccgctataaacactgttaccaaggcaaccagtttatcgtaattagctatttgtttcctcctctcttcccctctctccttccacctgagctttctctgggcaaaggagtatgaagggctgttatcagctgggctcagtggctaattaggtcctaatatcaattcagaggaggacctgccctttcccacaactattctgaaggatgctgcccacacttactagaaaagccagggttggaacaatggttttattatgtatgctccccagggcagtggcatacagaaacccaggagacagaggattaaaacttttggcctatggaagtcctaggaccctttctcttgtatcaacaggaaatgcttcttgagggtcgcagtattttcttagatttgcaacagaaagcgcaaatagtctgctcaccgtatgacagtgaagtctggccagtctgtgagctttctctggaaaggcacctggaatgagcatgtcaggtttgcaggccatgcatgttctgtccaatgactggactccatatgtatacagggaaacagcatggacagccagaaacaagtgggtgggtccatgttccagtaaaactttattgatataaatggaaggtggatcagatctggcccaccagatgcactgagagcctagcttagggaatgggtttgtaagtagagccatgcgatggttagttttagtgattaacttgatacaatgtagagtcacctgggaaggcaatctcaatgagagattgtattaagttgacccctgggcatgtctatgggccattaaattgattgtattaatagatgtggagattcgcccaccatgggtgacaccattccctgggcaggggatcctgaattgtacaaaagtggaaagagcaagctgggcaccagcattcattcattcattcattcattcattcattcattcctgtctgttcttgactatggatgtgttaagaccaggtcccgctgccttgacttccctgtaatgatggaattatgagccgaaacaaacattttctccctgaaattgtgtttgtagggtattttatcacagcaatgggaaaggaaagtaggacaagtcccctagagtgagaaggctgggccggccacagcagccagtgtgcttccggctcatcaggctcttagtaagaggaagtttctcctgctgaccctgcagagaaagccttaggcaagtcttgtttccttggcgtatactaatttgtatgaaatgatgggtctcattgtgatatttttatacttgtgtgtcatgtgttttgttcctgttcaatctgcttaatgctgtccctttccctggctattgctctccaagttgtcctccctgacgcttctgttttcatgttttccaaaaattctagtttcggcatgtgagagaaaatgagcactgtctgtctaagtctggcttattttgttagatatgacaggtctctagttctgcccactccctgcaagtgtcctaatccccacccacctcctgggctgggcaaaacgccattgtgcagctaggccacatttctttatccatccctctgctgatgctttgacctggtcgttgtgccacaggaatgtgatgagcatgaatcccggaaaccatggggaccgggtttctttatgttctcagggtggttagggattggactcagggcttcacacatgtgaggagagtgttctactgacagagccacatccccaggctttcctgggtttcctattgacgaatgccactcttgtggttgggaactaaatatttaagcaccaagaccctgcccacaaagattcaggcccctggcctcctcctttgtcacttttgcatcataatggtttgctgctatccagaggcagctgtaggtctagaatggactcaggcttcctgctcactgggtagcaccctcagtttttctctcttcagaacttttcagatgtttgaacttgggagggaaggaggctatggtgcccacacctcctaaccctcatccttgaataattcttttttttacctgtggtgctggggcttgaactcaggaccttgggctttctgtaagcatcctcccactgagttacacttacaatctcttttagataggatcttgctgtataccttcagcgggcctccctcagccttccaagcactggggtttcagatgtgcacactatgtccggtacctagattaccttaaagagcatgacagtcagcatagtgctggaggagctgagattcatgctgtcgttccccctgcttcaggtcagggatgtctctgggcagcacccagcctctgtatggtcagggaggggtggtggatatgtgaattcttcatatactatcgaacaagaagaaagcctcggctgctgactgaagtggctctacaggcgggtgctgctgtgggtggggtgcccacctgcactatggagagctgctgtttctagcctatttcactcagggcccatggagtggccgcccatgagcctgagcccagcttcctgtcacatatgcgttgagaagccaatggtcaagagagcatgcgagggctcccaggggcctttgtggacaggcctcggtcctgcacatggtctggctgtggacatctgcacgtggcctttgtggcagagggaacgggctgcgtcctctctccaagctcctttctgtatgagttcagcagcaattgccctcaaaccatttctgttggacttctctctggggagcttctgctttgtcatttaaaatagttcgggaacttcagttttagcccagtgtcagagcggtttatttggtctgtaggcgtttttgtttttaaaattcatgacaagttccttgcaacatgttttattatatttcgccacctgttctaccttgggggtggcattaaaatctggggctatctagctgtctgtctttttatttttttgtgaagtttccttatttgccatttatttgtgtcttgcaaacacacacacataatgtgaatttaaatatgtacatatccatctccctctgtattttcttctctctccccctgtagctcaactgaccttgaactatagttatattgctaaatgtgtgtgttttgccaggctaattatggagttctaagcgataaatttgtaaaacagacataggggaaacctttgccagtataaagtgttatcactgggaaaactgaccattaatagaaacatatgcacacatgcatctaagtgtgccgacatcgtaagagctaagcctttaagaaaatgcccctgaaggcccatgacccactgtagcgtccacagaagcagcggaggtagagcagtgtgggcaatcactaaacgtgggagaatccagtctctatgaacactcaacacaggtcactgcaaggccagggtcagaaaggacggctcagcctgatttctgaggaccgtgcagatatttgaaggatgtcgctgtcaatcatgaaagggaccgagacattttccagcagcctattctagttcctttattcaggttcaatgacaggcccctggagccagctgtgcctgaaggccagacttttcaatgatatgaatccggaagttaccttttggattctattttatagaattggaggggtggagaaggaataggaggaggaggaggagggggaggaggaggcaggagcagcatcagaagacaacaaaataacaaactaaaaaataaaaatagtgtaataaccccaaacctgtattgtcagaattaaactttcaaatatactatgtacttaaatgtgacatataaaatgtgaggtattgggttggtgagatggctcagtggtaaaagtgcttgacactaagcctgatgacctaagttcaattcccagactaccacgtggtagaaggagaacaatccacctccacgtgtgtgccacggcacgagtgagcctcccctaataaataaatttttatttatcagggagaaaagaatttaaaatgtgatttgttatcatcgtcatttttaacagatggcaagacatgtccatagaatgtgctatttctgtaaaagcaggttagtggctatagggagcacaagaacaaacatgctgtgtcagaaagccaggcagcttctgcatgtcataatgacaccaagaactgtacctgtgggttccaacatggtggcccagcccatcccctctgaactctctctctccagggaagctagaagctacctgctgttctgtttcctgtgaccagtgacacagggaccaagaagaatgacatatatagggggactttgattttgccattgttaagatctcagacttctgcgtcacataagcaagttgactttttaatgatttagtttagtttcagatgaggcaagtggcaaagtgtgtagttaggactgacctgggactggcggaaatccagtgatgggccactggatactcggagcatcagtctctctgtctggaaacggaaatgctgagaggtagaggcatggctcagcacttcagagctcttgctactttccttagtgactcctctttgctatgaagacactataggtggaagtttctctcccgccgggtcctgcagccattcaatacagaggcttatattaattataaactgtttggcctatttctcaggcttattactaacaaatcctttcaacttaaattaacccacaattcttgtgtatatttagccacatggctaggggaacaagatgagaccaccatactgagaaaaggtgccaaaccgagtggctaaacaagacatcacgaccaaggcaacttgtagaagaaagtttatttggggctcacagtttcagagggtgagtccatgaccatcatggcagggaccatggtggctagcaggcaggcatgttgtgggagcagtagctgagagcttatatctccaaccacaatcacgaggcagagagagctaactgggaatggtatgagttttggacagctcaaagctcacccccagtgacatacctctaacaaggccacagctctcaatccttcccaaacagttcctctaactgaggatcaagcattcaaatatctgagcctatgagggacattctggttcaagtcaccacactgctctaccatttggctcttagcacccctgttaggtgactctccactgcctgttgttcttgccccagaaggtctgatgccctcttcaggcctctgtgggcacctgcacacatgtgcacatacataatacacacacacacacacacacacacacacacacacacacacacacacacacacagaggtacacacacatggataagaattaaaaaccgagtctttaaaaagattggaaatactgtgataactcacacccagtgaggggtaagttacctggttacttctcagaagttccatctgacgaacatggagctcattgcaagctgaagccttgcaatgccctgagcaggcttacgggacctcactgaaaaagcagactcattcattgtcttctcctgggctgtctttctgaattactaggatggtgtggaacacactttcaaaaaaccctgtgggtgcggtgggcagtcactgagggggattcatcaggccaccactagagggagtgacagccaagtgttctgattcctcagagacaggctttggcttccagaagagcacatctgagagcttcctggggacagaggacaagccctgtagggccccaaatgcagaggttttgctggttttgaggagcaaatgaaaagacaagtggtcacatcatgtgttgacatgggagtagtgttctgcaccccactccctatgttttttctttcctttctgtctttgccttatttaacattgtgatctctgattctccctctctctctctctctctctctctctctctctctctctctctctctgttttcaaatgaccagattgtattttgagtgactgaagagtaatccatattgattatgcactatgttttttctttcttttaaacttttgttttgtttttcatacatcccgacatttgtttttctgtggagacacatgtaaatggctgtccttggggtaacccatcagtggctgcccccagagtgctggaatggcagacatggtctgcagcccaaggatggcacagggttgcacacagaaagtccaggacccatactgtaacccagaaggccttgaggaaggagctctcagatcttggtcatcagagctgtccttgacgaacaggggcatttcatggactgttcccagtgccttttctatgtctgacatgaaggtttgctgttgaacacacatgtacacacatagacatgcatttaacaaatgttttctgctgtcaaagtttccttttaatattgtgcaaatacatgctgtaagggaattaaagtgataaattttgagggaacgagtcaatcagatgctaaaaaaatgttcctaaaagaaaatttgaaaatttccaaacaaaaccaatcccttccccttacaactagatactacccttcacaatacttagaggtggtaggaagatatgcagataactgggcatttgatgttgtaatttgttaatgttcttttggttacaagtgacagaaactcaattgagagtgctgagatgagatggaagctaagtttgttccatgatctacaggaacacaagtctggccaggcctcaggcattgtatggtgggaatgcctcatggcctctcagggtgttccttgccagactttctgtgtgcatgcgtgcgtgcgtgcgtgcgtgcgtgtgtgcgtgaatgtgtgcgtgcgtgcgtgcgtgtgtgtgtgtgtgtgaagttctgggcaaagctagaagtggaaggaggaaacgggttcttggcagaccaaatagtacctggtactgtgtatatttttctgtcttcgactagcttcatggaactgcatcctgtctttaacagaacattctgttgttgctgtttctctagtcctcaaaatctttgtagatggcattttgaattactgcgttgtattcaaagatttggattcaattagcaatctctcaattgttagatatttagttgtttccatttttaataccggtttaggcttgctggcacgggagaacatttttttcccctgattcctcgaaaggatcaggtttactatagtaaataagaaagaggattggttctatgatgtctttccccgctttgaggttgatgtgactggttttgggtctcatgccctcctgtctttactctgcccttttgcccatccccactccaggtccagcacagtggtgagaatcaatggctgaactctgtggaaatgagtgggaggaagacagatgtgagtccagggagtcgctggtctgcctggctctcactgtgtctaggtagatgagctgtctgtggtatagactctctggccttctggaggatgaattcagtacctccaaagctgggcatcttgggcaggagtttcttttcagatggggcacaggaggttgtgcagggggccaaggatagggtcccctgggagaagagcagggtgaagggctagagtcccatgggaccccagcaaggacggactcttttctggaaatactttcattgcttggggcatccaaatactctggcctcaccttccaagcaggaatctgccatgttctgtttgggaaagctggcttgggacatcaatggctttcaatgtcttggaattttttttttgttttggaatttctcagatagaaattagctctaaatgcctttgtggaatagtgagagttcccaaagatgggggttgataggtcagtggatgtttcctagtggacagccaagaatacttgaatgtgtgaactttgctttctcctctctctctcccttctcctcctcctccttccttctgtgtttttggggaacccagggcttgctttgtgccaggtacctactcttccatcgaactgcttctccagccataccccctctcctctgcccaggagggcttggctggtggactccccaccacctaccagaagagagggacggaaactgaagctcttgtcgtactgtttgctggacattctgcatgagttagttcaaccaggttgcccttgagggtgcccttgccagtgctcttgcagtcttttagatgggcatctattggtgctctgttgtttcaggtgatctgtgctttgggtgagggtcagaatgtacttaaccattgtttttttttttttctgcattttctcatactttctatttgtggactactacagatttgtgagatgttcctgttccttctgacctggcctggctcccaccagtgttttacattctcgtttgttttgaatgatagtaagtgaataacgatcccaaactccatgagcccagaaggtgagcttgcactctgtgagcagaaagaaagcagttgacagcaggaagagctgattcggagcctgttaaaaaggaaagagaaagctgacatttatggactccagatatgcggcaggcaggcttcatcattgtttcattatttagtaaatagtaaagaacactgggacccacacactgggatgtgtgatattaaaccacagtgttttgtctctgtcggagcttgggttaagtctttccaagcaaggtgagccctgcttcaccccacagtcccgcctctcaggccaccagggctccgccccacagaccacctgccctggtactctgggggagacatcggaagacttgctgggaatcccatgggatgcaggggtccaggccaggtcctgctccacaggacgaagagacgtctccatggcatgctggcaccaccttgaaatctgggaccatgccctctttgccatgatggactagtatctcctcaaacggtgaacaaaaaccagaaccctcctttccagatgcctgtgtatatatacacttatacatacataaacacatatgcacacatatacacatgcatacatatagacacatatatacatgcacaaacacacacatacatatgcacacatgtatacaccttcatacgtacatctacacagacacagatctacatatgtgtacatacatacacgcacacacaaatacataaacacacatatgcttacagaacaccacgcgaagatgagagccgagctggagtggtgtacctagaagccaaagaacaggaaagcttgcgctaacctgctgaagccaggagagaaggctgggcagaggctccctcctggtccttagaagaatcagctctgctcctccatctagaccagaagccaccaggctgaggcagagccctttctgttacagtggtttggtctgcagtgctttgcacagtggtcctcgagatgaatgccaccaggagctgctgcagttaggcttaggtaaccccaagcccaattacaggaggcttggtacccagctggtggatctttaatagagggagcttagtgtgtatgtgtgtgtgtgtgtgtgtgtgtgtgtgtgtgtgtgtgtgtgtgtgtgtgtgtgtattataccagtgggaggtaccctcaaaagggcattgtggggccctggcctctctttttctctcctttggttcttggtttatgatggcatggggtccatgtacaccagccatgatgggttggtcctcaataagcccaaagcaaacaggccaagctggcctgacctggattctccaatcgtgtgaggaggaagaacgacctcattctctcagcaggttagggtaccagggtgtgccatagtgacaggaagttgatatcgcagggcccattctcagcttcagctgtcttctgtcctcgcacactttccttttgtgtcttcttggtgaccacccacctccagagccaccccctagagatgagcacagagacacatctattggacagaaccagaatgactgggcactggggccacagccgcaactccccctccaccactaacctcctgccgggctgaggctctcactccttcctctgttgccaaactcatcccctgctcacccttgcctgatcctctctccacacccatcggcaccatgggtgttagataattcccactaaccaggaagcccaccctggtggaggagtcactgtggtgggaacggctgctgcgaaaaaccgccttagctgttggcccacaagctgcctgcaatgggctgggttcctgtgtgaccggggaggaggtctgtggctgagccataatagatgaagaggtggaacagaaaccaagatggtggtgccatgatactctctgggtatgacgtacactggacgcagcggcaaagcaggaccagtctctccccgacgacgatgccaggggaggttccataaacatttgccattccccctttccgcatcttgctgtgctccccgattctcttctcctctgcctgatgcttctggagccagccttgtgccgagcacccgccgagtcctcctattcatgtagtctggtgcccgatatgtgatttaggggtgtcatgcgccctactcagaagcagggcagtggtgggtgggggtgaggggagaatcctggcatttgatctgctcaaatgcaccttaagagcaaacccatccccagcactggaggtatcagctgggtcctgcctacagttatgtcaaacaaagtgtgctaggaagtgccaactctccctttgtgctgtgacaccgagagctgccaaaagatattaaaaagcttgcacgagctaggtgatggcagctgtaactatctaagttattgcctgacagctgcagcgctgcctcactgctggcctttatagttgcttctgcatccatacgccctttctctagcaaccactgcaccagcctgcagtgggtgagtcgcttgcccagccccctgtgcctgcaggcagggagactcgcagcaagccctctcgtggagagacacccacgagcagattctgggcgaactcgtatttctcttggctggtccccaagcctggttttgcattggtcagctcggagtctgaggaaccttggactagagatggtgtagaggcgaggcgcacgcccaggcacacacaccaaatgcagcttttttttgtgtgtgtgttggctccgagtgagctagaacaatatcgccagctctgagccctgccagtcctacatctgctccctaaaacctccagcaaataagaattcggtggggttgtttaaccaacacttacaatatagacacttctcggctctctccccctgggctgcccaggcaccgggatctcgatgctggtggcaagggttgagagataaggggctaatgatcccagtgggcatctgtctccacagctccttccctggcatgttgatctggggcataaaacacatttcattgtcatgggcttcggggaaggtgtctgccgtgcaagctgggcttttgtattcttccactgagttcagtcttttcagctgtctgttaaataattcacacagctcatgaaagtagtattttgggaggcaggttccatccccgtcactctctgttttctccttcccattctcttttcttttttgaaggggctttgggagaagttggcaggtttggcctaggtggtctaatgaaacctctgcccattctcctcacctcaccagagcagggtcagagggcaggaagtcttgttgatagccttcaaggctgtcaaggttattcctaaggtttttagtttgattgttttctgctagagttcagtcctcacaggcttttctctgctctatattatgactgggcacagccatttccttccgggaggcctggccctgcagtatcccaagaacctcccagcgctaggtgtggggctgagatcctggaaggttggcagggatggagtggaagggcaccccgatggggcaatttgtaacctcccaacactggtccagacaaataaattactgtactggacatgctgtgtctctcgtgtgggcctgcatgtgggggaccgtccatgctaaacaagacttctttctatggaataagccccacccctctggctggtccccattggtaagtgttaagagttagaacctgtccccccaacctcccaactcaccctggaggccatgtggggaggggtagcctttacggggtgatatggttaagggggttaatgcctttctcagaggactaggttcattttcttacagctagtttagttgcctccaggggacaggttgttctgcagcaaggctgtactttgtctcgtgtgcacgtgtgcctggacctgcttttggtgggtgaaacagcatgagggcccatggagaggctgacaaggcgccagggtcacgtgatcatatcaagcttcccagatggtgagctactggaaacttctattctttgtaagtcacccagcctcagctgctctattgtaacaaaaaaaaaaaaaaaaaaaaaaaaaaaaaaaaaaaaaaaaagacccagagactgatattaggctcaagctgaagatcagggtagcaaagcacccggtcaccagctctcacctagagctaaagctgaacgggctgatcctgtcttcacgagctctcaccaagcctcagacctggagaacggaggcgtcctactgaatccttgctcctgtcttttacacccctctaatgctgggattaaaggtgtgagctataattgtcttttagaccgattcaatcttgtgtggatctgggtggtcttgaactcacagagatccatctacctcttaatcctgagccctaggatttaaaggtgtgcaccaccacctcctagcttctggctgctgggattaaaggtgtgtatcaccactgcctgatctctacagcttgaggctggctttgcttttctgagtactcagtcaagctttaataaaccataaataatggatcactacaaagacccttcttcagtgtgggtggtgtcatcccaaggaggacagaagttgatccccagcattcatctctctctgcttcctactgtggatagaaagtgacagctgcctcacctcggccatcaggaagcagagagaagacaggaagtgggccaggcattaagcctcaaggcccacccctattgccccacttcttccagctagactgtcaatcaaaggctctgaaacctccggaacagtgctatgggctgggcatcaagcatttaaaacctcgagcctgttgggtgtggcatatgacatccaaacagtagcaggagagggaggagtgttgtgtctgacctgagcttttcatgctgcatggcacctgcctagctctcccctccttggccccgggagcctcgccttctcactctgtcccctctattttaacatgaggttgcattgacacgggggacacacgtgttctcactctctctcactcagtctgtgtagtgttcccacgacggctggaggccctctcctgagaggatagtggagtgcaatgcaggcctgttcaaggtcacacgagaatggaatatggcaggggtttaacctgggcaagtgactctgagtttattcctgacccacatttgtcttaatgcctggaagggaggggtatacattgtgggtccagatgccttattgtagggccaaggttgagctggttctatcgggtttccaggttcacagctgcatcgctcagctttggaggcagggatgtgagggatctaagccactggcagacacagttcccatgtaggccaggctggccaccaactcttcatggtagtgtaggctagcctctggatccccatgccttcattcccccacccccaatgctgggattaaatttgtgcttttctatacctggtttatacagtggtggggtctaacactggtttgtgtatgcctgacaggaactctgtcaactggactctccagcacctgaaacagtaatattaaaaacagagcaggagcaagtgttatagatgagtgaacacagaagtggtgtgtgcatgtgtgagtgtgtgtgtgtgtgtgtgtgtgtgtgtgtgtgtgtgtgtgtgtgtgtgcatgtttcagcccttggggctagtaggagagaggaggacttgggaaagaacctgctggatttgggagcaggctttcctctcaccagcatgaagaaattggatgttcttgttttcagtttgtggatgaggaagcagagacacagagaggctgagatacttacccagggctgcatagtgacaaagtgacagaatcaagatttaaacccaggcagcctgatttactatgccatcctcttagccatcacaggacactgccctaaatgactagatctagggcttgatcacatggtcctggtggaggattttgtagacaagaacacagtgttgtattccttacaacttggaagagtagggtcctgtgtgtcttctacttttttcttttctttttctttctttctttctttctttctttctttctttctttctttctttctttctttctttcggcacaataattacactgaggccaggctgcccactgagactttgtcacaaataaactagatacatggccaacattaaacctccacagttcaggtgctggaggtgactcgccctcagtcactgcagggctctgcatgggatggacagccccccatgctgctgctcatggggctaagcttagttgtggccatttcagccagacaaggtggctctgtgtgtggttgctggcattcagatcagtcaatcatctgctggctcacagtggcccagctaccaatccgcatgactgtttcctggtctgtgtgtcttccttggaggactccggtgagataacatgaactggtagggtgcatggtggccctggctctgttctggctattctttgtaccccagtgacagtggctgccctgagtgaggttgtggttgattagctaacatggcttcagggttggaagggatgacatgaacccacgtgcccttttgtcactgttggcagctgttggggtccttggtgggactcagaatgcagtagggccaaccatcttggaccccattggtggcttctagggactgaggctttatcactgtcacatgtgaggtctgagcaagcctggtctggcttgtcacctcacctctgcttcctaagtggaatgggattacttattttctctgttgttggttgtccctatctgttctgttctgtttttttttttttaatcattttcacagacaagctaagtcatgagttgttttttctttctttctatttgttcatttgcttccccagatatcatgaggcaaaggtacccaagggtggaggctcagctcttccatgttttcttgttatttgtgtcaacaccagatcaccctttgtgcaatattgaggctataatgtggataggttggacacagtctggaaggagctttatcccaggaggaaaaatattagagaatcatgaagaggccagtggctgcttaattacactgtctcattcaaacttcaaccagccctgtatgtcatccttgcttctgactgaagactccttgggcctgttctggctcagtggtaataattccacggccagggttaacaaagaccccagatttcagtttccacttacaatctaaagtagatacagctgggaaagtgctttgtaaaccctctcccaggatgtagttggagtgaccttggtgttcttaagtcacttcctctgtcttctcagggaccccactttgcacatggaactttttctattcaatgagtatgatccatattaagcccagtgtgtgccgagcccactgtgtgccaagcccagtatgtgatgagcccactgtgtgctgagcacagtatgtgctggtcattgcttctggtctgggaatcaaaagcttccattaaaggacttcatactcttttttttttttttttttccctgaaacaatgactgtaggctgatttggctttatctgattaccaaaagtagagagagactttaatttttaaatgaaatatccagttcatatctgagcttctgctcactgggcatcttagagtggggtatagctggtgtatggatgctgaattaggaaggacacggcacgattctagaacagatgctacgtggatggcttttcaaccaaatgcctgggcctgtacagatgaaatggtttagaccacagggtaggtcccgggtgcttctggtggctgagctggccagtggtaggggcctggctcattgtcctttgctctttcctctgtgtcctgctccttagccagaagcccagctttctggctgtttgcagtttatctgttttgcactcctgtcttccacacaaggaatctaccatatcacactgccatcagaggagagtagaactttctaatctcaggccaagttgtacaatactcccaccaagtgctcgtcctcatgggcccaattttgggcaccattcttgctctcggagcttctgtgcgggatttcaaccctgccgagacatttggctacttgaattcactcatctccaagtgtgtgtgtgacacagacagaccgtgcttatctcatgcccagaaaccccactaaaggagcaaggacagatgcagccaccactgcccttggtgggggaggccatcgaacagaaggccacgagagcgggccatggcacacaaagcccattgtccccgctgtggtggtgctgggcctgtcagcgcctgttctccagggctgctgggctagaggcatgtgggtgcccacggtggatgggcactgggccctggaggctgccttgccaatagtgactaccccatcagggaagcaggaaggcagggaagaacttcactagttccctaggaattcccccatctagtttgagtagcctagtgatgacttggggactttcctgcagatgtctctccgacatcgtcacccaaatgaaaggtggacccggagcaggtgcctttcttcagaatggcctcatgtggggcagggtgggggtaggtgggggggtggctgtggcactgtttgtgcctcactgaatgcatgtcttcagaactgggaagggttgtgggtgattctggaaggtctcatgtggtcccctgtcctggaacactgagtgaccatcatccccggcaggtaccaagcagatcagagaagaccttaacagagagcatgcctgtgggcacctcacgtccttccagatgaagaccgagcacatggttggtgtgaactccgtgaggaccccggtgactagagccctctgttgagctctgctcaggccaaggggtgaatagagtggggtgatgagaaacttaaagagagccccgcaaacaatggctgtcggatgccaaagctggtaagcaacggctcttaatgtgtgaatggaagtggctggagctagccttcttctttcttctcttttctttcctcccccctccaaccccccagtcaccgttgccaagaaaacaaggagttagctgttttaagcatttacaaatggtgatgtcccaacagctggtctcagtccaactgagctattgtaagcgtattaaaaagacaggccagagttggagatgtactgccaacctcccttgcagagttggggaacattttacttggaaaaaaaggtcttatgttcctgcagagatcgacaggacggttctcctgtggagtcagcgcctcgcttggcagagcaggcggcacgggcaggcgagccaaatgcttcggcaactgggaagcgtggagtctacgggctcgggctggattcatcagcgcagccatgcagcctccctgcccgtgacaggaggctcacacacacgtgtgcagggatgccgctgttgtgtgtgtgtgtgtgtgtgtgtgtgtgtgtgtgtgtgtgtgtgtgtgtgtgtgtgtgtgtgtccgagcctgggagtggcggctgctggaccagcctcagggatgttctatctacagtggcctcccttcctttacatccaccacgccctcctcttctttctactcagacccagaaaaggaagatggaaagctaaggaaaacaccatctcccttctttttgtctccatccactgattcggaacagcaggcagagagaggcaccccagctcaaccctcgatctggggtgttcttcagtttttcatcctcggaaattgtactagccgagtccacttcttcactgaaggcaattaccagcggggccctacatttatggacgaggcctggtggaaagtaataggaaatgattattttttgttctgaaggccatctttattagtagtgcagcggggacgtcagctgcctctctgaatggcaatgcagtgttttgctttccctcggcaagataaacgatcttatttgttgatgtttggtgcttgagatgacatttatgtgaaataaaagagaccaaattaataataaaaaaaatgattagctagacacaaatgaaaaatgtacatctccccccaccctagttgtttgtatttacatgctatttccaaataatggcaagatgcccaatagttgggtggtgaggatttttttttcttttacaatcatatggcttgatgctgttctccagatcttgtctgaaagcagctatttgaaataaaaatgtttgcatccatttcctcgttaatccttcctcgataatacaacctgctgtagagaaatagcaaggcagatgcaccaatgaaaattcaaagggtggacactcatccctggctataaaggctgctcaccatgcagcagagagagcttttggacggaaaatatggcaaatgatggcaacaatcatcgggctaagagtctgctatttggagaactctggtggggtattgctctgctcgtaacggctggaggagcactcctgggtttagagctcgctggagagcgcgtctgtcagctagctctgccttaggctggtcttcactattggttcttctacccatatgctttctcactgggctggagttttttagatataaatagtactttgcaaagaatctgtgggactagtattttggggtgtcaggaccgttatttgcttatagatagcaggtcctgcctctctggcaatggcaggcttatggtagtgcggtgttgcctttggttcatcttttacaatgaaatgcagtagtgtaccagggtctctaccttaggacatattgtgattagggcatattgtgtgaccatgattctgtattgcacacacaacttgaggctgaaggtttgggtgtactttggcagggtcggggtggacaccgatttatatcactctacagttcaattttccttcttccaggtgtcgttatcttttttctttattaactcctgaattcagtggactttgaagtcacgtgcagattcaatcctcttgtgtgcatttattgagcaccatttgtctacaatctgagtttaatagagtcaggaaaggcaagtgcattgtctttttacacctggccagctcacatgcctcctatagagtctggtttggcacaattgcatgcacatagcaaacccgagccatgcacacacctgggcgagtgaggcgcggggtgaagacatggctctgggatgggtcacactgtgactcagtcttctctcagagggatctgccacatactgatgaaggaattgagcaggcagtggagatgggagaactttcgtgcacagtgcagactttcagaaatcagctcctgtgtggcttggttaacatgggggtatcatacgttcgccagagtggatgaataccaccagcctgtctagcggcgctggggcaagattcgtagtaaaaagcaaaacacgacatgagctctgcagctccccagcaggtgtctccggctcatctctctctgggcttcaggtttccagttgtgaatcagctagtattctaacaccaagtccacacagtattagtgtccacagaaaggtgctttagtctgggtggcttttgtcttgttttcctttctattcttgtctacgatacaaggccaagtgtgtattaataattctactcagggtcacttgtgacaagatagattctgatcttcccttaaaaggaggtcagaggcaggaagctgagtcacgtgaccctcagagtcacttacagtaacttgttttttttttttaaagttattctacaaagtaatgggtttcatgatggcacttgcacacacacacacacacacacacacacacacacgtgcacacacacatttgctcacacacacattcacttgtgcaacattctttgctcttatcatcatcttcccattaccctcctctctttcccctaattacctcctgctggtcctcatagtcacctcttctgatttcatgtatagtttggttctttggaatcctgtctctgcagtgtttgaccatgagaagtgtatccttttcggcgagttggtcagcaggcattggtaaatttggtatggtacagaataagtcattgcacgatgcccttgagagtctgattctatcaagctattggaaatgagtttgacagcaattttgtcatcagaaccaatggctagcccccgagagccaccatgctaggcagccagtctggtttgcctagccagagagagaaggaaggtaggagacaggatggggcctctggacttcttctcatgttgtgagtgtgaggtgtgaggtatggggtgtgaggtggccagcacactggcaggaggcaggccaggcttcagggtaagcagagactgagtgggagggagacggaggagagtcaggactgggtggagggtgttgcttctgtcaagaaaacccttagagtggctcctaagaaacagagctgggtggtgatatcatcattcctgaccaagatgtcaacattagcttccactcagtgtcagcaagggagagactccagtccactcagcagcatccacagatgctcacatcctttaaatggtatctgtatattatacacactaggttctttaccttcatgaacttactcttcttcattgtttccagacagggtcttgtgtggctctgctggcctggttatgtagtcagagatgaccttgaacccatcaatttccaaccttggagtgctgggttatgggtgtgtgctgccaagcttggctttccagacaatttaaatcatgtcgagctcactcatacatcgtagaagctgcgcaaacactggtgtttgattggcaagggatagtgatcagaagtcggtgctttcagcaccagccccatttctcccttgctttccaccagggttgctagaattgagtcacgtagaacccacagaccccaggggcaacgggagaatcttccaagtgctaatgggtgtgaggtggcaggctcctcagggtggacgctgtggtcttcctcatctttgtagtcttctcattgccacttatgctctcaggccctaagctggctctcagactctctgattaagtgatcagctcggtgaggattgcacatgcagagtgtgtggagggaaacatctcgcagactgccattatcttgctgggcttggacacgatgccagtgtgcaccttccacagcctggaggaaaactcaggacgcagagtgtcttgatttactcagctgtgtggtctgatggatggaggcatgagatgagatcagaaggctgacttccacggatgcagtgaggtttctatgccttaaatgtagatgtcagtgtatgtgagggctggctgcgtcttccttttcactcccagaaaggaaagatacgtgaaattcaatcacatctgcggaaattcaaacatatctttatttattcatggccatgatcggggcagaacctctaatttcaaccaataattaggcttgacaatagatgtggaaataaaacatttttgctgaattcacttgtcattcctccctgctgtagctggggtaacccagatgtcagctgtccccttgtttttctctccgagtatcccctccctccagtccctcatactaatgcattagtgagctgtggggcacttgctgggggcttcgtgggggagatccacaggggccttagactgcatgcttcattgtcacctgctcaaatgtctcctgagttccaggaacagtttcctaaaggtatctttaaagaaacttccattctatcaagaaaaccatttttcattttccccagcctaccccagccatgggctccagccccctgctttgtctctccttctcagcccacatccccctagtatcaagtagtttctcctcattctcaagcctctgccatccgccataccaccgctcacgcagttttaagagcttccaagcagaaaggtcgactatctttagcatcttgactgccgttcctcctcgatggtcacatcatctgcactgatgtgtttgcttttgtgttttactgtttggtccttgggatgaactatgatgaggccatatccgcataaagtcctcgataggatggtgtctttttccattctgggggggaggcctggacaggatcctatgtgcagagaagtacgtgtgtgtgtgtgtgtgtgtgtgtgtgtgtgtgtgtgtgtgagagagagagagagagagagagagagagagagagagagaggacagagagagcagatggtgcctctgaatatgaagtagagaaggaagcttgtgagtgaagggtaaagaggttatagcgagggagtcatgttcactctttggtgggaaggtgttggtggagtttttctgtgtcctggcagtggcttccaaaaatcacgagagacttaatattaatgttagttagtattaatagcttaggcttgtctccagccagctcttacaacttaaattaacccatttctgttagttaatccatgtgctgccccgaggctcacttacctcatctatgaacctcccatgtcgtttcttctgcgtctggctcctgactccccacactccacccttcttcttcccagcattctctctgcccaaaaatccggcctagctattggccaatcagctttttataaacaatgtgagcaacacatatttacagtgtactaaggttgttccacagcatttcccccttttttgtctacatacaaaggaaggctttaactttaacacagtaagattatatacaacaaaacagttaccaagtaagaattacagttacaatatccagttcatttgtatttgagagaaatttagagaaaatattctatcatttaccattatctttatgactcataaataaagaaaactttaattatttagtctttatctccatcaaagacttcagaatggtacagttttacccaatgacagggacttctggctgcctggacagtcacccaaagtttttctgcaatgttggggcatctgtctttggcctgcagacctagtacatcttacagagatttttgagaagccaggaattttgaaggactatcctatcttgtcttggcaaagtttggcagtcactttctttgcatctttttttctgtttcttttttttccagattttttatttgaattagaaacaagattattttacatgacaatcccagttctcttctctctcccctcctcccctaccaccccctcaactaaaccctacctatcacatatcctttctgctccccctggatggtgaggccttccatagggggtcgtaagagtctatcatatcctttgggatagggcctacgcccacccccatgtgtcctggctcagggagtatccctctatgcggaataggctcccaaagtccacacctatgctagagataagtactgatctactacaggaggtcctgtagattttcaaggtttcctcaatgaaatccatgttcctggggtctggataagtcccatgctggtattccagctatcggtctgggaagcaagagttctccaatgttcaggtcagttgtttctgtgggtttcaccagcctggtctgtacccctttgatcatcaatcctccttttctgcatctggattccagttcagttcagtgattagttgtgggtgtcggcttctacttccaccagctgctggatgagggctactgggtggcatgtaaatcagtcatcaatctcattatcaggggagcgcatttaaggtagcctctcctctgttgcttagattgttagctggtgtcatctctgtagatctccagacatttccctagtgcctgatttctccgtaaacctaaaatatctccctctattatggtatctccattcttgttatcgtcccctgactcaacctttctctttttgcatcttgctggtccagtttagacagtacactgacagcaattagggaaggacagtttttgaggtaaattttgccataaagaaaaactccatatggagtttcttcaatgaccatcatcttctctgatgtagattggtgctgccaagagcagatgtgtcttgctgtcatgaaaaacctcaggttattaaacatattaaatgtcatattttgtaggtcaagtatttgaaaaccatctatctaaatatatctgtgtatgaccttggaaacatatttaacatggttatcagtttgactgttatagataactattaatcttattttaatagatattaatagatatctattaatgtatttcttaattatacattacatttttcgagacaaggtttctctgtggctttggaggctgtcctggaactagctcttgtagaccaggcttgtctcaaactcacagagatccgcctgcctctgcctcccgagtgctgggattaaaggcatgcgccaccaacgcccggcttatacattacatttttaaatgagctacataaacacaatacccaaacaagagtagaaatagacatacagtataataaaattaactttaaatttgtatcaataaaccaaaatcaataccaatgtaaattattttgagattaatagttgtcttttggattaaagtagatttaaaatctacccatttatctcatttctatatcatattccccctttttcccttagaaagagatctttaaatttaactcctttgtctaacttttcttatgactatgaccaacaacaacttgtaaccaacccccttaaatgatgacaaacatccataacctatcttttgggaatgtgggtgttgttttctctagactgatttctgttgtctgggggcactggcatctttggggaaaaacttgagaaaattaggataactggtaagtccttgcagtagtattctgtgaggctggatcatctcagccagaagccttgaatctgtttacctgggccatccgttttcattggtgtctggtccccttgctctgaaaatacatagacttttaaaggcgacatacatatctacactgacacaagtacagactgcattgtgtgcaagtcagccaaagatgattcttcccagtgttctctctgctcggaaaaccccaactagctatcgaccaatcagctttttttattaacaatgagagcagcacattttcaaagtgtacagaaggttattccacagcaggaagggagccagcagagggaccaaggctgagggttgatgtctgtgaagtgttagttacttgtcttgtggatgtgacaaaagacaaaactcctggcaacctaaggaagaaaggaagggtttgtttgggtaccactcctgggttacagtccaccatgacaggctgtcccaacaagagtgagagcaatgtggtcacgtgcagccagtcagggagcagagagagatgaacactagtggttcgctggctttctccttttcatccagtctgggaccctaacatgcagaacggtccaaccacattcaaaatgggtctttctacctcagttatcctaatctagaaacttccatggagagatgcccagaactttgtgttctaggtgattctggattctgccaagctgatagtcaagagtgagcatctagtgggcagaggtgttacattgacagccaagacaaagcatctggtgggcagaggtgttacattggcagccaagactaagcatctagtggggggaaatgtttcagggtccacgacaccaagacaccaagaaggggttaatgcaacagacacagatgtgatgggagtgaaggcagggacgacaggactaaggacaggtgagcacacagaagaagctgggtggatgaggactcctggacagctattggaatgtagagtcccaactccacccaggtaagggctgtgctttggccattgttgctcacttacggaatctaccctagcacttacctccatactcatctttcccaggcatcatctagagctggctcacactggtgctgatgactaaatatttaggtaatttgctggctgttggttgggttgttggtgccttgaaagtgattattgagtatttacaccatggaaattggcagcagctccagagcctatcttttctttgccagaaatgccagaggtgagacacccagctcctttttagttctgagctctagatcattctgcttggctcacagattgcctgtttgtggcactctcctgctccacccaaccttgatgtgttgcagctctgctctcctctccttcagcctcttccttggtccccaagccttggtggccttgggcccaggtggcaatgtggcatgcgaggtacagagtttggcttctgggaaacacagtgagcattgccagggtggtggcagtcctgaatgcccttggatgctcttctgtgagagactttgggtaaactgtattctctctacccactggcaagttgggcaaactttgactttaattatttatttctgtggcaggaaagggatttctccctactctgcttcagctgtctgacatactcaggcagaagccaacagggcagctgcccctcttgttgaggatcagggctccatcaatacaatggcagcttgcaactcatccacagagctgctggtgcgtggtttgcagacgaatcccctcttcccagctctccagcagagtgcctgatctggctacctatacggttcctccacctctgcccatcacagctgctcttgtcctgtctgccactggctagaagcagaagttggggaagtccagaaccaaggacatgaagtatgactctgcactgaggtagagtagggggagtcttggcattagcactgtatagacctggggttgacctgggctctcacgggtaattcttcagctttagaaaggtgctaaattactaagtctccaagttcaccttgaagaatgaagcgtgcccttgcttgtagactctggtcagatcccaaaaggcactggctgaagggatagcatgaggctaaagattaatttcagatcagtattccctttctggatttttgctgcccctcactgaacccccagatgtctgacaagccccctgtctacacattgcatgcagacactccaatgcacaaggtatggtgtgaaaatctgaagagagagtgatctggggggtttgagtccaaagcagctgtatgtcactcagttttgtccaccggcattggttggggatgaactcatgggcctcacaggtttctgcagtgtacttccccactgtggctgacttcaggttgctattgcatgagttgcaaaatgcttggggtttggacattggcaacatcatgatcgggcccccaacagacacctggaaaaggtaatttatcaatgagatcttgcaggtttctggaacacctatggtatattactttttttttctccagtgacaaaatattcaacaaagtaacttcagtaaggatcggtttgtcttgtctcacagtttaagggtgcacagtccaccgtggtgggggaggcctggcagcaggagcaggggcaggaggcagctgtccatattgcatccgcaggcaggtagcagagggatgaatgcaggcactcacctcttcttcctccctccatcctgggacctctgtcagatggtgccgcctacattcaaggtcttccttcctcagtaaaatgcctccaggaatagactcatagacacaccagaggtgtatgtactgtttaaaattcttaatcctgtcagttgacaataaataactgccacacagggttagttacaccagccaagcagagtggttaggaggcaccaccaagaaacggctgaaaatctagagagaatcagtccatggaggctcagaaccaggcaaggtctgtggtcccagtaggaaaggaactgatgaaggtggcaggcagagcctttgaaggcttgaaggaggggtccaagggctccgactctgcggtaggtggagccgcctggggaactagggcatgttgggctgatatctgagaaaggtagagaattgtggctttccactagcatcaagagagtcctcccatgctattgccttcttctaatgctgagagaaccaagtgagagaatgtaggcagaagacggacacagtgtctggctcagggcaccaccaacatctttactgtgggcagcctgttttctcttcctgcttcactgccccttagggtggacgctgaggtttctatttctggttttttttttttttttttctccaaagtcagcacagactacagcacatcctgggtacccattgctatggtgtctgcgggcaccgctgggcgaagggaggtcaacaggacatcgatcgattgccttcactcgctgtccttctgggctcttagatcaagggacagcttggagagctctttaccttgaggactgacgccccaagccctttcctctccttacgcagtgccatcatggcactccaaggtgtctttgcatttccgccatgagcatttgtggactgcctgtacctggctctgggctggttacatggaggcaagaggaataagatgcaggcctgtccatgaggtcacactgagagttggggtgtggcacttaagaattcctgtctgcatacacagtcagtgaagggcagccttgccacggctgactcagaaacctccactttagtctggtgtgaggccttttcatgcaacttgctgctgctgtctgtgcctgccatttacagaaacttgcacaaaacccctttgaaatccttaagatacaaaccctttgaagcaagttaacctgaaaaacatacaagagaggagaccgtggagctcttaagtagttgggaattaccctgttgcaggcccctccaccctagtgctctgctgtgtgggtgcctgcacagccatggcccagtgactccatctgtagtcagtttccacgtagaagacaactgcacctctggctttttgctccttgccctttccgtttctgtgatcagctgttcaaaccctgcctccctgcccctggcattccctgacttgtaccactcggtgccctgtgacgaccatagcttaggagacggtcccttcctactcagagggctgctgcttttctgcatggagcagccactgtttccaactcatcacctattgcatttcaccaaagatgtctgtcagcaccgagtgcaaggcggagtgagctcaggagtcaggagcacattgatgcacacccccccacacacccacacccccccccacaccagtatattcacacatatgcacaaatgcataggcacatgcacatatacaacacacatacaatatatgcatgtagataaatacataggtaggtttgtgaactaatgtatgaaaactcagtaaacaggactgcattgtaaggggtgcacatggcaacacataaatgggcagttataagcttcaaggaaaactctatgaggcgtgtccagcctcttgacactgtgacatgatgctgtggtctacaaatgtcttctcaggatgggaaaggaagctgaatagacctgtggcctcttccgggaagacactccgctgtgagtgaacccgccctgctcttaatttcttaatcccacctgtgtattcttgctttgggggagtcagtgtttcctgaagactgtttcagctcatgtcagcttctgggcccacctggttgcaatgggacttttgacttcccttccctctgatacctctactagaaagacgtttgcacattgagccagatagcgcatgggccagtaggtagacaaggcagccagcctctgcctgcctccttccaggccattctgatcttccagtccaagacattgcccagtccatgccctctgctgagaagtccggcttggtgtgccactgagatgcccattgcctctgggaagagggaagccaggacaggccaagatggcagatggcttagggtggccctgctgctcttaggcttctctgcctttgtcacttgtgccatctaaagctgacggctgctgtttttaacttggcggtctgtgagtttgaggagggagctgttgtcactcaggaaggcagggtatttttagcatagagattctgcttgggcctgggcattgcgagttttctagtgacaggctggccaaggacggatgaacaccaaattgcttggaggaccatcaggctcagcagagaaattggtaggaataacgggaaggtgggggtgtaaaggagaactctggtcctatgtgatcgtttgtttaattttaaccagttgctttatttattgtctcttccttcctccccataagcaagctagctgcccaagtgaagcagaggtggaccctgagaagggaagtggtggcaaagctcttttttggggtcaaggaattgccgaacaggaatcagagaactcctgaagctgcgtttatcatggatgggcatgcgagagcaggctgtagtgaaatgggaagtcagggcctccctctagaccagagtttgaactcactttgcaggctcgtatcctgcagttaattcaaaggaagggctggtcaggcagatattcgcccctccaggacgccttcctgtgaagagacgcaggtgggtgatcaggttgtctagcctcgtctgttctgttgcttctctctcccgccagacacccctccctgtgtcctcttcacaggcgaagaaactgaggcccagagagggtgagtgacttgttcagggtcatgctaattagcagtagctttgggactggagggagaccaagtatcctgacatattaatagcaccggggacgtctatgttgactgcctcttgttcttattttaatttggccatgaataaatttagatacgagtttgagtccctgaggcgggaataagctgggggctggtcagggccatgctgagaggctttgagtgcggaagaatgttttggactttactctatggtttggatgtaaaatgtatccccccccccccacacacatcggcttgtgtttaggcccttggcccccatctctctgctccttggtcctcacagatgtaagcaagcggcctcatgtttcaaccaccacagctttgacctccccctgaggttgtgtctctcctagccacaacagcctgggtcatctcagacactgaggcaaaagaaatccttccttccgtgtctgcttctcctcaggtcacggctatagagatagaaaagtaactagtaacagcttccttcctgtatgggttccctgtgcttcaagtagctcccacttatggaaggcctgctaccacccagaagacactgggtgaattcacatggaagagcctatgaagtaggaaagttccagacccatttcttcaatgaaaatccagacctatttataactgcctcccagttggctccaggcactggaatttgtggtattttgtggtattctgaatcttgggcatgagggtggtctctttggtcactggtatgttccgattgtgtctccttgcaacttgggttttcccagagcttgggggtggtggggtatgaggaggtatagttggctaggagctgggtcacatatattactgtaccttagattttataacagagtcagaccctgggccgtgtgtgtgttcttcccacatacactatgcctctctgatttgtagtcccaggagataatacagacaccctccttgactccagagaagcagaggaacacattaggccttgtctggtatctttacctttcctactacacaaagaagccaacagccctttagatgctgagtgacccgagggacaatgaggggaagcaggactcgattttctcaggtaccatgacacaggttgacagggctaagccctgagttccacaaagctaaggggtgcatctgtagcactcatctttgtctccccagctcctggaactcatacatgtggtgctgtgtagacaagatgggtacgtggaatgggtccttcaggcaatttcttcctaagaaacagatctatacttctctaaggagcctggattagacctgtgagaaaattctagaacagacgtgagatgtctgagaatagatcataagatgattaaaaatacattttaaagtcaaaatatgtttaatctacggaaatatttaaatgtataagcatttaaaagctgtgttaggaagcaaagccccacgtatgctgagttcttttgtctatccagtcctcctccctgcctctttcaattctgctgtcttatctttgggccctttgtcttcttgtctgggagctctagcagaagatgggtgcctgaggagaggcacgattagcgagcttttctttgactctttcctcagatgtacacgggctccctctctggtcatttttcctattgttcctttctcttgtcccttcaggacttggggtggtacatattagcagcccctctgccaccagccctaagtattgcaagccaccctgtggcttcatgtcccctttgccacccctaaatgagctcttcttttatgccagaggacctcagtctgatagtacctgctggctgcttaccaccgaaacaccggtgctgccccccacacctttcaagcctctcccaggtttcctgagctcaccctgggccttgtgccctccactccttatttttcttgtgtgtaagctagctgcttttacccagtgtgtccatcaggatgaagacacatgctcaccatccgagcaaccagaaggctgaggcaggaggatcttgatatcaaagtcggcctgggctacatggtaaagtctcatctcaagagctaagcctggcagtgggactttcaagtactaggccctgggttcaacgccccatgcattaagaatgaaagttggaggtggccattcattttttgcaggtgcttgaactgggggaaacgggtgctgtgaataccatttgacacgcgtggtgtcaccgaatgcttccatgggatggcgcaggtctcctgctctttctctatgtctgcattgccttcctgtcttcacttaggttccctcgaggcagagcttgaagcagatctctgcatgcacatggccgacacaggggcaccctaagagaaagagtgtgagggagaccgagggcaggtgggaccatgacaaacaagactgtgggcttccgtgaagcctactttctacatggtccccggggactccagagcatgaattgcaccgagcactgcctctggggagagggtgctggtgtaaggtggctactcttcatctctgaatgtgagcgagcgaggcagctgagggctgctagttacaatggctgggtggtgaggtggcagctggggagggccaggcgggtctgtcacagtgtggccctgtttagtgagaaaaaggttactgtcatctgcatcttaccgatgcatctcttccttttttcatgccccctcctctgtttcccacccatccttgtataagcaccttgggaacccctgctgtgtgaggactgtggagcatccaggaagagcatggggcccgtctctgcctcatcctgccccatcctgccatggcaggtgcagtaactgacaactgataactgtctgtccccaggagctaagggaagcagagaccagtgaggaccggttatctctgagtgccggtgcccagtctggccccgcccgtctcagcacctcttcctggcttgccctttcttctctggtgatactgatggttgagttcacattcccactccttttaggccatccgaagtttctgtttcaacaaaagcctcctccgtgggggccacagtgcagattgccactccgttgtgccgtaaaacaatggggtgaggacagacagaggcggcgtggcgagtgggggccgtaattgaatccctctcaagcacggttttcggatgaaacggagggaagccgaggggaggagaccacggtggcttttacctgttcaaggtgtgggaagagaggattctttttccgcctggggaatgaacaagtgcttttgatgcagcctatgtctgtcacagtccatctagtccgacagtgccaggagggccacccattggacactagaacctcaggccagattgataggtgtgaggacacagaggacaaagggccttcttcagtgcagtgaggcttttccagggtctctggctgcagtcctccgaacctggacctagcatccccaaatcacaaaatgtcggcttggagctgctgccacgggagaaagggaacttggcatttggttgctgtccgtggcaggcatcctgaaaggcttcctatttaacattttagttgcatttaaaaaagaaaaaagaaaaaaatgaaacaaaacaaaacaccactaacaaaaaataaaatgaaaaagaaaagaaaatgaaaaagaaactcaaaaacttgccagtgtctcataacaagagacactctagcctgtcctttcgctacgcgcccgggctgaggggggtgtgggagcatcttgtctccctgaaacgcagtcctctggagcggccattttcatcaagatccctgtgtttgcttggcagaactctggattggaaaaacaatagggtctcctgccagattccgttaatttcagtagcagcagtggccgtggcagcagtctgcttctctgggatgaatatttgacaagactggccaggaaagaggtttgggagtcttgaggggtcttttacagcggagagtccatgccttctttctgtccatcggttgttcccatcagaacatgtgctcagacagaatgtgggccgtgtagcctgcaggtgggaggggaagagaactctgggaggcaacaaggatacggggagatggagtgtctcagggtggagtcatggtgtggatgtatcttctgacccagccaagagagggtcaaaggtcactcctcacctgctagggctggagagcatccaaggcgcctggtgctggcatgtgacaccaaaggacatgtgggaaggtgtctgctccctggggtcacagggcaatctgggaaagggagctgctatctagggaggaagacataaacggaggcgccgtgacccagactgagagaacgctgggctggggaatttccacaggctacccgctaggttccacttgggagtgtcccacctggaatgtttttctttttctttttcttcttggagccccacaagcctcctagatgggagggtgctgagatgccctgccggccagcagtggcagaaaaggagctgcttgctggatcgcttctcagtcatgtggcttccctctgtgataacatggtctgagcaggaccttcacaagactgggtggaggagtaacgagtgtgagaccagcagtgtgagcacagtcagtgcccatgcagtctccattttttttccctctggagaaccctgactgacagacacgggccactgaacagcaatgtgaacactgatgaaggcactgggctgtgtaagagcccagagaggaaagagtggggctctttctctcaattctcccctgttgccatttctctgtactgtctctggatggtgtttgtccttcctgaggcagaaccttctggagttgttgaaggagctgtggtgttgcggcatgtggctggtttatttttatgctttttccagttcagcccagggtgaaccttatcatggcttcacaagtgccagtctcactcttgtcctcaggacaattcacagtggtgactgaggtgaccagtgtggcaaggttaggccatagaagaatgtagcaaagcatccaggaaggcgtccccagcagaggcccacgcaaaccttctcaggtactccacaacactaaacctggactatgactccttagccagagaggctaaaatgagaaggttcctgaggtcagccacatctctgggaaggaacagggcagcaagtataggaaagcatgagtcacattcaggcagctctgaaatcacatttaataattgactcaactgatacgtgtatgtatgggttatgtcataggaggttcagcacaaaggctcagtgggtaaaagtgattgctgctaagccccaagacctaagttcaacctaggggacccacaaagatgaaggaaagaactgactcttgcctccaattacactgttgcatgtgtgctcacacacacacacacacacacacacacacacacacacacacacacacgcacgcacgcatatgcacgcatggacacatatgtaattttagaaaaggagtgtcaagtagaatgtggctctgaataaggaaaaccctggacaccgagttcaaatgtggaggtcaggtgttctgagaaacagaatatacaatcagccttgaagagtctgtagtcatactgaggcagctggagagatgctgtctcgaggttcagagttcatatcccagtacctgcacaaggagccgtgcacgcctgtaaccacagccctgcggtgagaaaacatgagccccgtgatccaggagaaacactgtctcaaaaggagtatgtggagagagacagaagacaccagaagacttcctttgcacaagtacagcaccccttgcgtgtatgcacacatgtatgtgtgaatgtttgtgcacacggtcacacacgcacaaacacacacacacacacatacacacacaaagtctttagaaagtaagagcagaatgtgtagccccaggggatgctagatagacagacatcatgtacaggacagaatggcaagctaaggagagtgaaggtaagaactggtttacagcaggttgctggccttccggctcagtgttttcaggctgtggtattgaagctttgtccttgtgtctatgaagtcatgatgaggtgatgatgccatgataaggatcaagaggaacgtgacagccaggaggaatgacaatgaggttggagtgcagggtttcccaccactcctggctttctgcagctgacctttttccctgccatctcacttgccccttgggtgggtggctctccagtcctgtccccacacaggtggtttcagaggaggctaaggctgcccacatctccagaacccccatgaaggcggccaaggaagttgcatgagtaggcacaaagaagcttcaagttagaaacagatgcctgcagagggaaggcacgcagcccagacagagaggagctgtgggttagggctctgacgggctgtagaccttacagggaatggcatcccctcgtgtgttgcacagtaggccattgggatttgcctaaagttctagagacagtactaaaaggttgccttgttcctgcaagcccagggcaatctaggaccaggaaggtggtatagccgaaatcaggatggaagacaagaattctcaaggctttgtgaccgtgggtaaagtcatcccgatggaggcagggggcatccgttcactctctggaggagaaatggacacccccgagcatctggtcaggaaggagattggccttggtggctttgtgggttagctgaggacagcaaccttcagtgccatgtacgtagctgctgaagctggaatcacagaggcatggtggccgtgggctatcaggctgaagaggaccctcaggggtcctaggggagctgagccattacacatgagtgcttctctacagccaggggctggggatgagagtgaggctcaggcaagccaaagactaggtcagactgaagggactacacaggatgagagtgtgaaagacaccgggtggggggtggggggtagaccttggcgggctggttctttgcagcttggaatgctctgtcacgctggcttgcctgcacattttgtgggcattgacatcttttgctcactcgatgcctccttttttctaagagtctctgaatggctgctgtaaacaccttcaccctggaagcccagggtgtggggcaggtgtggagagggctggccttgtgtgtttctcacaaggttacattaatatttgtggctaagatctatggcctttcgcatgggcttggcaggctacagtgggggcacatctgtcttccagggtgggcttccagtcaatcccttgggtagaaatgagtccagcgctctccattagatgactgcagtgaagatgaaaagggggaagggagaggtgacatttctgggccccactccctcccctgacatccagacacaggcaggtattgaaggctgagagatgcttttgcctatggcttaaagtctgaaggctgatgaggatttagcagaggccgtgtgtccatggagggacaggagcagctgtgcctggggcaggtgactgtgtctttagctacctgggtccctggtcttggacattgccatcacctctatgagttgtttttcttcctacatcagtcttgtcttttctactggaatggggtcctgttctcattttgtcagcttccctagcacatggtgcccatgctgcaatctctttaacttcagaagcccttggtaacaaggcctttcattgagttgggaccaaagtctcatcttcactttgctatcagaggaactctgagaagaaggcaaactgatgctggaggctgagaagggagtaatgtgtctgctagcgggagacaggcgaggtcccctggcgacatcaggagctgagagcaagtgggggagtgcctaaccttgaacccccattggccccatggttctcacttcttgaactgggaaaggtacctgtgtgtagtttaaaccccttggtttgtagtcactcactgtggctgtcctaggtaaagaacggagcaggcacgaagataattggaagatcttccaagactggctacggggagcaggagcggtgggggcggggtaaggtggatgccctggattgggtactggcctctggaaacccgaaaaccctaaggatcgcctgaagactgttactttagggtcaacccttgcctgcttctcccacctcccaaactccacagttagccccccaagctactcatactctgcagagcccgtgaggtcagagggcttcctccattccaaaggcacagggacaaactggacctgacctgtctatctaatgactcactcatcagatttgtcaaaaaagtcacttgctaattactacattattagttcaggattggcactgagcaggctgtggggtttttatattccattttgtctttacacaaaatgttaggttttgcatttttccaacaaaatgtgctttattgtttgcgtctcctccgctgctccacccctgtactcttccaccctcccacgggactgacttctctcctttctttatgacaactcctacagtatacccagggtcaggatgcccagggtcaggatggttccccgccccgctgtgccgcccccactgaagtccttctggtaccacttgaagaatccttgaggtgctgccacccagttcatcatctgatgggctccaggaggggacgagcactttaaaagcgggctatggaaagcagatgaaggctgtgtggggctgaaccttcctgaggtcaaggctacgattcttctgtccccagctcagccagagcagggaggattctgccctctctgaaccatgacaagctaagggaagaggtgtcgcgcacagcctgggatggacaggactgaggctggggtcaggggacactgaaggagactctcctgcttctgcacagttcccttccggtccctcaggtgtgaaagggtgagaatggggtagcctggtccacaatcctctcaggcgaagctggcctgcagaggggttgtgatagctgctgtcccttcctgtggccccatctggagagcagggaagtaggaagtcccgaatgcgggtgaggagcttccatgaaagactcaggcaatggagtgtgcggccttacacagctcaccagcttggcttctaccgtttaactcaccagacaacacgtggcaatacatcaggtggagggcacagactacttgtgagttgttaacttttgtgacaatgtacagattgccagggaagcctttagaacaaatgatgccagtgaagttctcacgggcgagtagatctcctgtgaccgccaactccttgcgctttcctgagtgggagtctcaagaagctggggtggttgtgagtgtgtccaggctggggtgaagatgagtatcccagggtgtcccaccaggacctcacacactgccatgagccttgccaagggctgagagaggtattccagatgggaccctgctacccctctgcccctcaggagtgcggggactccaagaacatttccattggtcacctaagagacacaaactgatgacctggagctcagtgaggaaccaagacgcctggactagccaaggaaggcaggcaggctgctagcagatggctggttgctgggtgaaggggccagttaaaggggaggaagatactgaaagggcactgggaggtcaccctgggtgtcacagtccttacctgtcacagtcttgtcactggtcacgccttatctgtggctgaccgtaaacaggctaggctgtgtactccggtgtgttagacaaagatacacagcagcagagcccactgggcagctccggggcgcccggaaccaccttcctatcgtctcctttggctgtgtcctacacttcctcatctttccatggcatgatcttgcctccctttccttagcttaggctctgagagggtcagtcccagctccagagaggttgaccctgggtgaaggcctagcagcagggagctttgcgggtgggtgggctgcagctggccatgttcaagtttgggctggagctctccccggggcctgttctgtttgccatggacagatatgtgatgtggcacttccctgtcccccagggtgggctgccgtcatcccctttcagagggcctcctctctgctgccttttcctccccctaccacagcgcttgcttgcatctccttacactttgttaggaatctttatttccagattagtcaccgcgcacacaacacggagcgtccctgatttgaggagcaaaaacagtcattactagattggttctctgtcgctgagtgtgggggaacaaacaatgctgcacaatttccgcttgtgtagcgtctttcaaaccacaccatgccccagcagcgctcgagttgctgtaaatagtacaataaccaagataaacattctaaacatctttgcatcatctggttgtgctgtgctgagccagtgttggtggcaagagggaagggctgaggacggtgcagccctgcaggcccagaggcgcatctagagggaacaggagttcccaatggaggcagctgtgctaatggaggtcaggagagcacctgggagattagagggcggtagcgatggtcctaacctgcttttggaaggtctgctcgtagaaggggtggcctggtttggacaaagctgggtacagctggggccacaaggatgaaataactctctgtccactgcctggaaaaacccagagtgtctcaaagaacacaggattgggttctggctcccttaccaacacaacttgctttgtgtctcagtttacctccctgactcttggttttccttaagatgggctgagccggcaagtccctctgcacacctggtgtccattgctaacgaggctccacagattccctaggagtgagactgcacaagatctggccacttttcttttctttttttctttttctgacagagcctgcgggggagctgcctgaattcccctggagcaatctcctacttggagcagtgggagttcctccacagctgctgaggatggccacaacctcaaatggaatcagcctgcattttagcccttctcccttctccaagcacggcctttctgttcgccatcgtctcactttggccaactttcaaacagcacaaagatgtgtgtttgggaggattcatgtttcctagtgtagtgtctgtatacagtaggcatacaatcattgctggtggttatcttaattactagtgagagcaatctcatccactgggaggaagccccgctcagccctggagaatgcatctgggaacgggaggtgaggggctgtatgctgccctgatggaccccttgggccctggctgcagcagtcgctgggataggttcctggtgctctctctcatgttcaagttgtcagagctttgttcatccatacttcctaatttgggtgaagctggccatatggagagcagggaacggtgttaaaaagctttcacacatagatggtgcagcactttctctgctaaacgagaactctcttcccagtacagatttcacacgccgatctccagggtgttgagttccctagtcaacaggggtggagttgttggggctcttgaaggcattgtctctggctggcagggtcctgttccgaccccaggagaaatcccatctttttcctcccctgggtgaaggctttctagccctctcagctgagacaacttggcttccaagtccaggccgagcgtgcctggctgccctcagctccagccccagtcagtagctgccaggcctgcacgccagggtctcaggggatccctctggatgcttctctcatttcacgtctggaagggagctgtgctgttctgaactgagcccaagccccctgttccccaacccacggcacattctctagaactttctctccaagccaagacatctgctgcatatcactccctacccccccccccctgctctgtgtcccccaggcccaactgcctgagcatgcctggttcagtcagtaaatgaatgtgctcctctgttggttgggaggcatcacctgcagacacatacgtcacttgcctaggagagtttcttccatgatagttcatgctgcctgtctttgctcttaaaactgaggcaagctggggtttgtgatcaatttggtctcaatcctatctcacccttcctaccagtcttagcatgagcacacagagatactgaagaagccaagccactagggttaggctcaaaaccaacatagaaatagtgattgtcatcagccatttattgagtgcctactgaatgctcagttctattctttctttcccaaaccaggtaaacacctgtgtgtctgttctgactttaaagacaagtgacctcagagtcagagaggttaagtgacaggagatgaggttttacaagtcatggtagggtcaggattcacaactagagctactgacctcagattcgtggccttctcctgtctcagtgccaaaccacccaatgtgtactcccactggggtcaagggcaaagattgcactcaaaggcagttagagcgtgcagagaggagagcgagggcttcctcaggctgggggatttgcagagcgcaggctgcagagtgaggggggactgcgcccagcacgtcagggtctgcagctttgttctggtggaactctgccacccacatgggcttggctctccttgtgacccctgtgcagcacggcaggggctggctttgccaccccgtgggaagaagaggagctggaaattgttttgagatgttttcattgattttctttaatgcatagaaacatttctgctcacatgggcttccatgagagggaggaaagaaaagattggatgcaactttgggggactgggcggagctcagggagggagcctgagagccttgtcgattgctcttcaatttatcagtattttcctggagtttctttgcaaagccctctgcttaatctcacggttgggtcaggcactgggagaggagatgtggcctcctgggtcccttggctggcagactagttcaggctgggcagcggggtcctgcttgagtccatacacttaacccagccgtagctgtctcactttttgcagagagaatctagccataaggttagagttctaggactttccaaagggccaaagcaagggatagaggtccaggcatgtggtttctgggtgggtcatttatgaagctcgatactgagagcttcaggctctctcacctgttgttttattgtgggaatgaaccttcattgccacacagtcaccaggaaggcctgccgctgttccagcatgaaaaccaggtgaaagggacagcaaggacagagtatcattggtcagattccagttagagttacacacatgaacataaatgtgtgtgtgtgtgtgtgtgtggagagagagagagagagagagagagagagagagagagagagagagagagagagagagcattgcacacatgtgcagtcagaggacgacctgtaggattattttattctctccttccactggttccagggttccagggattgaactgaggtcatcagacttggcagaaggtgcctttacccactaaaagcaccttggtggcccaaatccggttcttgagaagattttctttcttgattaatgagcatttgaggcgaggaaagcaagggctccagatctctgtccctagatctcatcccgagacctgaaggtatcccagcacctccaggcctcaaatcttcaaagagcccccttctcaattttccttgaatggccccaacgatgctattgaattttattagaggatgtgtatatttgctgaatggatatagtgagtggctgacgagtgaaacagaaccgtggtaagaaaggagagggtcatttcaacacagcctagaccataccaaaaggaagaagggcattgtaaaactacaaaaaaaatattacaagatctattcacacattgtctacacagctgttgatcacactgggaaggattcaaccaagatacctatttagtcccaaagcctttcttttgaagtacaagtcctagaagattggcacttttgttttactgggacacagtctggtgacgtttgcatggggttttggacttgccctggagtagtcctctagggctttgttgtatttctacttacaccgaatagaaacctgtcctcctggagggaggaggaagactggagcagagaggaggaaggctccaaagactcaggatgccaaggaagtttataaactcgtaaagtttaagatgcacagtaatttgtaggatccactcgcctctggtaagcttcttgacagtaacccatggtaggtgtgctgggtagttttatgtcattttgacacaaactaggagtcattggaggacagggaacctctatggagaaaatgtctccataagattgggctacagctaagcctgtagggcgtttcaagagggcccagaccactgtgagtggggccatctttgggcaggtggtcctggcttctataagaaagcaggttgagcaggccagtaagcagttcccctccatggcctctgcatcagctcctgcctccgggttcctgccctgcttgagttcctgtctgactttgttcagtgatggacactgatgtggaagtgtaagccaagtaaacccttcccttcctgagatgctttggtcatggtgtttcgccacagcaatagaaaccctgactgagacagtggctgaggaggctcttctgtggagctgcctacaaggtaggcagggaacttcagggatggagttttccagaactaccacccatgctgggaggctttctagtgagagtggcctttgcatcatggatattcccgtgagcaaaccctacctgcttctgtatgtcactccagctggttcatcaggccacacccaaatacaactgtgtctctggcttggtgatggtgccttctctggtcagaagatctattcacatctccccagaaaaagttacacaagatcctggttaccaataggccctcctagagtcactcatgtgtgtccccatgcctggcttcctctaacatctcctccgggtgccctccagactcaaatgtctgcttcattcagtttgttctttacctgggaaatccagttccatgcttgtctgtgcaacccattcctctttcgtctaacatgagagtcacgtggctgaatgtcactttatttgtttttcttttgttctgaactaaggacaagctgcccatcttcctccaagccctggatgctgggcgactgtgattggcagtggcccaggacataagacaaatgtgccttaggaagcagatctgccagagacattctgcgcagtgtgggctctttccaccccattcttggtggcaggagttttatgtgtctctgggcaactccatcctttcctcctccccgagcccctaagaaaccctgaccccagaggcaatggctttggctcggaagctgtcttttcattctgtcaagctcattgctcagatttgggcaccagtttgacatggacagtccccaggaggatggcagcagtggctgagatgagaatggtgacttgctcagcttactactgaaaagtttattttaaaattggtgccttgtgaccattcctgtgcactccaagctcccgatccaggtaggcagacaaggtggaaggatacctcacagaatctctcagctcctgataaaagcagagcccactttcttcccctctgctgccctttgggtaggagagttggaaggggtgaggggaatggtggagaaaggcatgccttagggggaggcagcaggaggaggggggcatgggctggctgaatagagctcaagagcccttgtgtacaacgagattagcacgatgtgagcatttccatgccaaggtgctaacgcaataatacatgcgagtttgccaacttttcaaattgaatgtatttgattatttgcttttaattagtgtgagttttggagtatgtacaggattgtcagggatccccacaaagcctcccacagcccaggaagcctccccttggtagagatggcccgggattgttcttttttagtgatttaacagctctggtaaatgtttcagcccatttccattgtgcctctgtttcaacccattggcaagaccgaccgaagtgagaaaataagcctcttgtctgatctgaatgccgagggctgctcctgagatgggttttccagcccagcttgggcttttggtgagcatccctggtttgcttcgcagcttgggctggtggctttctttgcctttctttgcgagagttgtcttttccctgtccttttccctacaagtgcatttcaggaaacaaacaggcggcagagagggacggaaaagacatctgtttatacagttcagatgagtctccagagctctttccactggccgtgcatttgagaccctctgagtttgctgtccctctgcatggcgctcctctgctgtgtgaggggacagtgaggccgtggagaagctaggtccccatccagtgagtgaaggaactgttggacaatgctgccctggctggtgggcccaccctcacgtatttcatgcggtttgactgggaatttcctcctgcatttcccatgggggccttgaaggcaagcgtcacctacagaattaaaagtctcttatttggcccaagtgccaagcagaaggagaggtggaggggtcagggcggcagccctgtctccccactcttccgtttgcaaagaagaagggagcctgagggtcttctctcacaggcctgtcactctgctcatcttggcctcaggacaccaggacctggatgagactgaaacccacccaacatggctgccaccttgtccttgcccgctgccagctcccttggctgtgcctacagctcaccagggctgtggaggagctgcccatccaggggaagaaggaccccttatccacattctgaggacggccgcccgcccgcctgcccacccattacctacacaatctctcagttacattaaaaaaaaatccttcccccccttaacaataggaggaacaaatggttgacaaataacaacagcagcggctccctgacaaaagcacgcaattattacaattacactctccttgattaggctgccacgcactgcatttcaatgtaattgatgttgcaggttgacacatcggacgcgaatattctcgcctgtcccttctctcttttgtttctggggctgatttgcattttctatgcttttagtaatgaagacttagcacttttcctccattagaaaaaaaaagacagatacaataatctgcaactcggcacttgtttaaggattctgaccctcgaaaataccactttgcttcacacattagctgcttacaaagaaggaagctaatgtatcatctaattgggcaaaccactgcatctgatttctctcaatcagactattagcttcgtaattacccatctgcctcgtgtggaaaaacggcaaggcgcacacccagctaataacattctcaagagctctccaccgcagtgagagagaggaggcggtgtggagggagatggtctctaaccatttccatgccaaggtggccacacaatgcagggggcccatgccaacctgccctgcctggatactgttcaccagttatctatactgagttgccattttagggggtctgttcgggatcaccatggctgctgtggtggtggtggtggtgatggctgtggtagacactgaatgtggtgacctgtgggaaggtctcttcagggcatgcttgggtgggaggacaaatggtcccagtgtgggtattctcaaggcagagccaacaccaccaaaacaagaaacctcacttctctttttgctcttctgtggttgggcccctcctttctccatgtggtgttaaggagggcttagcacagtgccagtgtggtgactctgacaccaggaggagtgagcatcatgactgggtggtggccttcctaacttttcattggtttttgtttgtttgtttgaggcatggtttcatgtgttccaggctagcctcaaacttgctttgtagcttaggatgaccttgaactcctgatcctctggcctccacttcccaaacgctaggattacaggtgtgtgtaccaagcctggttttatgtggtacttgatatgggaccctgggtttcacgcgtgttagtccagtgctctagcaaatgaactgcatgacccacttgagtcttgcctcgagttctgtaggcatgtttgttgagctggcttctgcagggcttttccactctaaacacagattgacctcagggcctaggaagctcccctttctctagctccatgccctgggctggagctgggggatgactttgactgttccatctaggacgggggtgagaatcatgtggatgtgtttgggggagcaagtgggcctgatttttgtggagacccaattgtcatctttgaagtcctcctgctgcctcttaggacagcctggccattatgtgtgtgttcttaataacaatcttgcttgagcaatgtgctctaatggaagcatttgagacccactgagattctaatgcccaatgtgttttctttttcaggtgggcacactggctgctggggtcatgcttgttgtatgtggctgcttcacttagctcatacctgttacctggtaaatcggtaagcatggacgggcagagtagaaaggtttgattctgatatgatttgaaatagtccattatttaatcataaatcattgggctgggaacagaaatttacatatttaccccattgtctaggaaaatgtacaaagagaaagcccagctatgtgatgttctgatgagaggcccaatagctactgtgtgtgagggcatggtccccctttacgtagctattaatagtaaataataaacagttttcttcttacatgagtaagaagtcttgctaaatcctctgtcaaactggcaaggaattcctgtggtagagaaaggacatgaactcactcatgaacacagcttagccaaaggcagccgtgctgtggaggatggctttctgacattccctcctttctctcccccccctcattcccctttgtcctccctccattctctaccctcccctctcatttctttccctcctctaccttcctttcccccttccttctgtaattctggtccctgcactctttcagtctttagaggaatggtctctaggtagcccagagtgttttagactcttggtcaccctctctctgcctgggactctaagtttataccaccacacctgggagatatttttgtttaggacactattttattttatagagtggtaagaaagcagaaggggtcctatctggagcataaggaggggagggggacaatggagggcaccaaatagtggcacatgtatgttttgtgtgctaacctaaaaaaaattaaaaacttgtaacatgctattggaagaattttgttgacttgggctaggtcacctattaaatcttcaggaaaaccaggggcccagatggctgtaggtatcatatctttggaagttttggcaacttgtggaagatgcagacagtgcatcgcctggagtcttacaaaaaacaaaaaacaaaaacaaaaacaaaaaaacaaaaacaaaacatccctaaggattccttccaggtctctgtgtaatgaaaaacttgttttccccaagccatatgtacagcctgtattggtatctgatcctctctctctctctctctctctctctgtctctctctctctctgtctgtctgtctttctctccattggctgctaggaagctcagaggtgaggccagcctttgctttcagtcctgcaaatattcacttctgttaggtcttctggtgtgattgtattatgcatgcatgtacagtatttaaatatggggaaatgttcttgtgtgagctgagagcagagagccactggagccacacagggctgatgcgaccaagaaatctttcttgtggcaagaacaggtttccctagaggttcagaagttagccatgaagtctgctgagctgggcttgtttgtgagagccttcccttcttatttgtcgggtgagtgggacatcatttgttaggctccatgataactttcataccctcccctaacagttggaaacactaagtggtccaagtccacccagcatcctctgggagcatgggtgggagaaagagatcactgtagccccagctggccctgaactcaagaaagtccccctgtcccagtcccccgggtgccaggatggcaggcactgcctcaacaagcaattttctaacaatattgcgtctaatgttcatcaattgtctacacagcttcagcaattactctaaaatgaagatatatggtttaatttcctgtgtttaggattagggctagagacagaaattgcatatttcaaacaagaaccagagaagggcatggcacctaggtaggtgtctctggccacacccacaatagctcttcacccagacctgcagtctcctcccctatatttatttactatgagtctattattttgagtgtgtgtatgtgagtgtgtatgtgtgtatgtgagtgtgagtgtgtgagtgtatgtgtgtgagtgtgtatatgtgtgtgagtgtatgcatgtgtgtacctgtgagagtgtgtatgtgtgtgtgtgtgtgtgtgtgtgtgtgtgtgcgtgcaagcatgttcggtgcagatgttttgtgtgagacagtgtctttctttggcctgggactcaccagacgttctaagttgttgggccagtgctgggatgctttgtgagagcatgtccttgagtctggctttttatgtgggagctggtgactgaacgcaagcaagcactttcctgatggagctatcttccaggctcaaccctcccattccttttaaaacttctcttcaaacatggtcactccccagtggctaatgagccccccaacctcctctcctcccctcccttcccttccttccctacctgtatgtcagcactggttagctctcactcacatcactgctgattgtacaggtggagacgggtgcgtaggtcaccagtgggagagcttgtgtgtgactgttctttgtcatcagggtgtggtcagtcaggacatcccttattccactgatctttagtccagacagctttgttgggggggggtctgttgttcagggcacacctggcctctctgacgctttcctggatgatctccaggtccctgtgactgcctgcaaatcaagcttcctgatgcaggttctctggtcacctcatgggaaccactctgttgagccaggctaggagaaaagcaaggtgagctttcagatcccactttccctgaccttggtggaggcgggaatcctgtaagcaatttctgacactaccttttacctaatttgatgttggaaatggtcctacggcttgtgattctttcaggagatgccataattcctttaagaacatgagcgccatctacatagtaaccacagagctgggaaagcgctgggccgccagagcaggctccacaaacagtgatgagtagtagctatgtaaagagttcaccctggaacaacacaaaggttcccccacaccatgctgctgtgcccgctgtggtctctcctgtctccctgggtctttcctcctcacagcaccacacaattcccagatgatgggaaatgcagcagccaacttgcagctgacagtaagcagattatgtcacagtttatctctggccaatcttgcttttctctcttagttaccatctttgagcttacttaatttctttattgcttttatagcctttgccatctgctacagaagctggagtcccatggaactagaagagtaaaaattcttaaatggaaataattattttgaagccaacgagcctgggaaagacaggctcttggtgggaggttagccgaggctagacaaagcatagggtacttaggaccaggtgggcctgggaggcatctgtgtcttctgctcagtttattgagcaggaaacaaaagccttgatcagggcagaggcttgccaaatgtttcagggccacctggaggaaactgtgacattaaattgcaggaccggaagctagggaagtcacactcttgaaggccagtgagatccttagaactcacaaaaaggtgtcagatgtggtggtgtgacttgtccccgtgctggggagcgttgggacaacagggtccttgggccaatctagactgtgagttccatccaggctaatgagagaccttgtctctaaagatgtaaatgactgcttcttaggatgacatggctctctctctctctctctctctctctctctctctctctctctctcacacacacacacacacacacacacacacacacacacacacacacacaccacacacacaacacacatacacacacacacacacacacacacacacacacacacacacacacacacacacacgcacaccacacacacaaacatacacacagaggtaattggaattaattttaaaaatctttaaagaaagagaacaggccaggtaggtgtggtggtgcacacctttaaatccaacactcaagaggcagaggccagtggatctctgtgaacttgaggctagcctggtctacacaagagttccaggccagccaggatatataatagagagaccctgcctcaaaaaacaaaacaaatcaaaacccgaataaacagaaagagggagagagggagggacacacacacacacacacacacgcacacacacacacacacacacacacacacacacacacacacacacacagagagagagagagagagagagagagaacaatagagcgagcatatccagaaacacacagtgcacacttgttgataacttgacacagggagatcacgaacttcctcgctgtctgtcatgtaggtcacccagtgtgatgcttgcatttctgcccgagagttgtgggtatgattgacaccttcaggcagggggaccctgtgtaacaccctctgcatctgggtgaggtctagtctgtgtcttacccccatctgcttctgctcctggtattttaagtaaaaatatttggctctgcatccccaagccttgttgtaaattgtaaactacacatcattaccactggtaaaaccacaccgctgagcagcagcccacagagccacagaggttctccggagtcattctcctgttcttgttgatagattttacttctctcctggccacgcgtgcatgctaaatggaactaattcaggaagaacccttataagggacagtcctttgtatgacacagatgccaacagtgcctccatgagggcctgtttcataaccacacctctctacccgtgtctgccctgagagacggagtgagggaagaatcttcttgataaattaggtgtaaagccagcagctcaagtcaaaaactggtctttcttctggggagaatattttttattgaccctgagaggaaggtgggaactgggagtaccgggactggatgggtgcttacggctgcatctctctcactcactgctccgtagcagggttttgctcaggacactggcttcttacacaatgaattatataacattctatctacttactgtccttgttggacacttagctgtcaccttgtcaaagcctacagttacttccaaggggcagcctctgttgaggagtcctccatcaagttggtctgtgggcatgttcgtgaagaattgccttggctaggaattgccaaccatgtgaggaacaccgttctccggtagaaggtcccgggctatatatatatatgtatatgtatatatatatattatatataatatatatatatatattatatatatatatatatatggccgtgtaagccagagagcaagcctcctgcctccagttcctgccctgacttctctgggtgatggattgtttcctgggcctggaagccaatgaaccctttcttaactttcccttggtcagagcatcttattacagcaacagtaaagtgtcctaggcaagggtaccacgcttcagtttggatagctaatttaatgtccgcgagctcatctgcttttcctctccctactgtttatgccactgttagtttcactcactatacttccccatgtcataattttctctttagaaagtttctttcatgttgactgtcccccacttaatttttcacatgggccaatcatgtgaaaatacttaattactgttttaatgtcctttgataactgtaacatctgtgctagttacgaattgttttatctttgcgactaatgtttttaaagtcttgttgtctgcttgcctttttgttgctgttttgtttgttgagacagaatcttcctatgtgaggtggctcaggatggccttgaactcacgatccttctacttatacctcctgagtactgagattgcaggtgtgtgcctttatccctggctgagcctggtcattttataggaggtactgtaaattttacttcattgggtgtgagaatattttatattcctatgaatattctaggactttgttatttatttatttacttatttatttagacaggatctcactgtgtagttctgactggccccttgctatacaaaccaggttggctttgaactcacagaggtcttcctgcctctgccccctggtttaggtgtcagtcttatttctgaattctacctcaacccagggtgtcccccaggctctgcctgacttcctgtccctgcactgtaccccagagtactgtactgagacaattacaggtccccctggcatgttcccatgtccaaggggtgccgtttgctcgttggtgtccactgtaggaaccatggctccatacttttgtcctctggggtcatttttaggtgagatggtggatctagctttccagtgcactctggctgaaagcaactgtcttcatggtaatttaaacttaagtttcttcacatgaaacaaaggaaagtaaaatcaggttttcctttgcttgactgggagactgtgtcgggtagggcaggatggaggtaaggtggggagataccctgtcagtctctgagagctgtgttaacaaaaagcaccattgatgggtggctcccacaacagcaatgcattatctcatgattccagatcctagaaaggtcactcgcgtggggtgtctgccatcatacctgctgcttcttagcttgtgactaaacaacttcagtctcatgtaatgttcttccagtgtgtatgtctgtctatgtccatttttttccatgggacagagaccagcaggcaggtgtaggctctggggatgtcatacaagacagggagttgagcaggaagaaaatggaatgaggatttttaccaatgaacctgactacacagtgtgcttggatgctggacatgttgtaagaagaacatgagctcagtgccctgtcccttgacagtcaaatgcatgaggaacccacccatgcttcctgggtggctgaatgcaccagggaccacatgtaacctgggcatccctgaagtgcagggacagcacttgtttgcttttcaagacagggtttctctgtgtggctttggagcctatcctggtgctcactctggagaccaggctggcctcgaactcacagagatccacctgtctctgtctccccagggattaaaggtgtgcgccaccacccccggctttcggacagctctttgtaatgccagagaggacacttctcagggagcaaggcttggatacctctgattaacaagcagaaagctagaagtagccctgtgtgattactgcacatttcaggacagtaccctgagctagcagtggcctggacgatgtcttcaatctgcctaagaaggccgtccgtcagggaagtaggactctctccttcttagtgttccttgttgctcattcagctacacctgctctaacaatgaagagtagcgttgccatgctttttggatttgggacaaatggctttcaggcatcacatgttgtgttatttttccctcatgtgaaaattgctggcattaattaaggtgatacatcctcattttgttatctggtggagcccaaatatatgccccatgggaacactgtctggggcatagctgatgtccagcaatggtttgctctgctgtgtccacagtgactctgctcatcttcatgtcaggtcttgccattttgtaaagggggaaagtgaggcatagagaagaaaaagtcactcagcaaggtttaaagccatatgctagagaaaaaaaaaggtcactcctgctgtgatgacacatagctcagtggctgaatatgtgtgcggtcctgggttccatctttagcatcaatacaacagcagtaacaggcatggggtctcttggcctcctcgaagtacgctttggggcgaggtgggcatgatctccgaggggctggtactgattgggaatgcctttctgagaagctgttctcggggaaggagcagacaccctgcctgaggatgacatgatgtggttagtgagtttcaggaagacattcccccattcaagggcaattctttcaagctccaggtacccaagccctgagcatcgctccagaatctgaccactccagcccttgcctcatcttacacatatttctctttgaggccggcatggtcaccttctgagagctctactggccaggagaaaccattcgtggaggaatgctgatgaaccaggcagtctggaccagagggaagggctcagaatacagtgtgtgggcatcagggccacactggccacattgcaagagggacagcttggaggggatgggatagactaacctgtgcttcactggggacacaggatacaacaaaacaggaacccaaagctcttcaggaggccacagcctggctattgtggctcacactttctcctggtgtaggggctggaaattgacaagaaacagaaggcagagttccacagcgggctgccggctaagcggcccatgtctggctccaggtgcctggtggcccttcccattcactgagcacaaaacctccccaagcctttcctggtgggaggtgttatctccagtccacagacagagaagcctcatgctctgaggatgctgtgccttctacctccatgtctcctcccacccctggcgggcactgggtaccacacgcgtggtccaggtcttctgtttccaaacccgagccttatctcccacaccgtactgtctcttggagtctttaggagaggatcatgctgttcaaacaagcacaaggccagactttggagcctgggcttcaagggccaacagcacttccatcccggaatctggcccccacggtaccacctccttcccttttgaggtctccatggcagccatgggaagcagtaagagatgtccttacattacagcatctgtgaaggcctttacccatgccccccgattttccttttctctccagttcattttctgccccaggttattgaaatataatatataaaccctgaagacatgtacaggatgatttttcttacagttgtataacttgagtatgattttctccatctctactgctcacttgctcattcattcattcattcactcattccattcattcattcacttctccatccagctacttgcactgattggcctcctactttgtgccaggctggagcttatttaatcaaaagggcccttagtagacagtgaggaagtagaaggatataaagactgctgattgtttttttttttttatagcacactaaataaggatggtcaagagccaagcagagataccttttatatcatagcttaagtccctaggtcagtcaaggaggctgtaaattaggtattctctacttgtgcgccttttagtcctgagatatttttatgcaatcctgagtataaagtatcgatacaagtcaaacactcactgataataaatcataaggaaatttattttaaaacatttggtatatattacaaaaattattgataccaaaattattaccaaaatctatatatacacccatatatatgggcccatatatattatatataatatattacatatatattatattatatatattcaaaaaatcatatattaaagttatttggtatatatatatataaaattttgacgattattaaagatgaatgtaaattttcatgctaatgagatgtatatacctcttgggttttacataaaggaaaaaagaccttggctgactgtttggtgtagagcatcatcggcactctccagcgttgattgacatttctgttttataatcgtccatgctgagaatttgctcttgtgtgactacattgaataaaacagcagagcgatgcttagggccatttctgaagggttggatgttctaagctgttcactgaatggtgttttaggagactcaaggcagcaactcaagcggcagtacttacagacttgagcattgtaacagcacagcccaaacacacattaattggatgctcacacgctgaggaagggcagtggaacacacacatttctgttttctgtcgtgagttatgtttctgtgagaatagaaatctttgtattcatggaatacccaagagtcagggctgagctgcggtcctctgggatgcgtgtgttggcttgtgtggcatgccggcctgccccctgcaacatgccctcactgcatggctgcacctgcagctttagtgaagtcacccagggcagcatgggagatgctgccgggaagccccacattcattacttgtttgaattttgagttcatgtttggttgttgcatatcagagcgctttcaccattgtaaatcttttttatggctccgacgtccatctgggacaatgtcctccaggtcaagatgctgaacgctggactccaccagaagtccctctggctcatgaaagaggcagagagagctggattctgtcatcttctggctgctgtgtggactctgattctatggcacatcttactccttatagaccaactgctgcctcaagagcacaggagcctcccctccccccaggtcacctcacctgtaccacagactcccagggctctggccctgggttgagtctcctgaatggtccagcatcctctctcccatggcagagaccctccatgcaatcagactgccacaccttggctgcgactggccgcacaccctagtgcagccttgggggctttgagtggtagctctgcatgtcctctctctccttcctgggaacccatgtgccagagtggttgggaatgtgaaattcaaatccacataatgaacaccaggctgagctctgtgacactttgtctgcctttactctcagccatcaagtgttaggtaagtgctgtcaaggctctccatgagtgagtgtatgcaagtgtgtgtgtgtgtgcaagtgtgcgggtgtgtgcgagtatacgtgtgactgtgaaagacgtgagtgtgtgtatatgagtgtgagcattcaagtgtgagtgtatgagtgtgagcatgagtgtgtgactatgaatgtgcatgtgtgtgagtgtgtgtgtataagtgtgagtgagtgcgtgagcatgagtatgtgactgtcaatgtgtgtgagtgagtgtgtgtgtgtatgagtgtgtttgataatgtgaatgtatgtgtgatgtgtgtgtgtgttggtgtaggtgtgagtgtgtgtgtaagtgtgagtgagtgtgtgagcatgagtgtgtgactgtcaatgtgcatgtgtgtgtgagtgtgtgtgtatgagtgtgtttgagaatatgaatgtatgtgtgatgtgtgtgtgtgttggtgtaggtgtgagtgtgtgtgtatggtgtgggcataagtgtagatgtatgtatatgtaccggcctaggcagttgttggaggtgacagttcaaactctcttgcacctggaatctcaagtaggaactgtcactgaagctttaagatatgatggcttcagcacagaaacctttctgttcttggacctttaatggacgggatgaggccatctgccctattgtagttaatttcttttttcttttacagtactggccttgcaacgctgctgcgcgtttaaccgctgagctgtgcgcctcagtgccccagggtttctttttatttattttgatacaaggtctctttaagctgcctgggctggcctcatagtcattctgtttcccaggttggccttgaacttgtgatcctcctgcctcatagttctttctgagtagctgggattacaggcttgcaccactagatcccaagaaggtaatctatctagctgcagtggctcacacctgtagtcccagcacttggaaagctgagataagaggactcctgccagtttgaggttagcgtagactacatagtgagctccagtctagcctgagttataaactgagactctgtctcaaaccaaaccaagctaacaaaatagctgtcttagtttattttcctctcactgtgacaaaatactccagcaaaagcattttaagggctcagagttcaagggtacaatacacatgatggagaagtcaagatggtgggcacttgaggcagctggtcacatgacacccatggtcacgtgctgattgcacacttgtgcttggctcctgcgttccgtttttgtagaggccaggatcccccaccagggaatggacccatccacagttaagataggtctgtccatctcagttaaagtcatcaagacaattctccatacactgcccagaggttcctcttccagggatcctacatccccccacgctgagaatgaacactgacccccacagcacccaatatgaaaattattaactggacattctttctctaatagttgacttcgattctctgttttaaatcttagtgtgtgtttgagtgccagtgtacatatggaggggcagaggacagcttttgggagttgtttatcttcttccggggtgggctccggggattgaactcaggtcaacatacttgcacagcaggtactcttactcactgagccatctctgtctggcagatttgactttggaatccagcatgtgctgggcctctggcatgtcacaatttgcacaggctaggatatgctccttagtcacaggcagctggtgcttactgtattagatggtgtgggcttgcaagaacgcttctctaggttcccttgtgaatagctgctttctcagcgctaggggtgggttggtcagggagtgtgctgaccacagatcctacactaggacacaatgaacacagtctgcatacttagacctgcctgctactgcccagcactcaggaatacaatagcagatatggggcatatacatttaaaatgctctgtaaccattggcagagttattttacatctcttgaatctagtgattaaaaaatgggaactataaatgtatcatatattcattggctatgtcaacagatttacttaaattgtgcttcaaaaagctttcacctttaatgaaaataaacaagaactcttctacagagaacagtttaagaggcagggctcctgggcactgagtcttgagaggtgggcactgggagtgtttctaaaagctgtccactgagacacaagtttctattgaaattaggtcagaactccaacaggcatagatcttgcattactttcccatgttattttgtttattatctgcattgctgcgtttggagacctgggtgggtcttcatagcaaggtcacctctgttcccttccaaggttgttgtagccctggtagggcggtctgtaccaccctgacattggtgcaagccaggacacagggatgtgagtcccacttcttgagacgctttgtaaacgctttaggatcccagagtttcaaggttccctctgatccttcacacagggaataagacttttcagtcgccatctcttggagctcacaggcgatctgctttttttttttttttttttttaaaggaaaaaaaatctctagagccaaaggagccctatttttttcttgtccttgcgcaaagcttttatagaacatcttgagttttcaaaggcggtgcgtgtattgatttttttgtccctgacccccagggttcattgctgctgtgttttgggctgaggctctctatagaaatcccagtggccccaacttgggaagtcttggtgattggacagcactagaagcagtttctttatataaaccatcacagatgtcctttgtcatctgtcttctctcacagcgtctttcctgtgtgcctcgaaacttttcaatcagccttgaggtcagaatttctgcaaagaaccggagctctacctctggcgccagggcagacacttcaggctctgtaacgcatgctccatcctggtgcccatgtagacagggttcagctcttcttacatctcagtacactacctactcaacttgctggggcctccacagcaaaatagcacagactgagtggtggaagcaacagatgttgcctttctgtagttctagaggctaaaagttcgaggtcaaagcatggggagctttgtttcctctcaaggtctctctccttgtcttgcaggcagtagttagtctgctctctcacagtcccccctctgtgtgcatgcctggtggctttgcctgccatctgcccggatgcatcagcactctttcttataacctcatttaacctcaattacccccttaaagggccgatgtttagatatttcattggaagttagagcatcagcgtacatttccgagggatacaactcactgtgtcgtaccttccctagagactgcccaaatttaattctctgatgcataggacccggatctgtgggcagcaagaaactgtttttgactgcttactctttagataacatttccaggacataggttgtgtctggttttcatgcgtacaacacccatttccttgttcttctcttctccagagacctgtcctttcctcatggtcccccagttagtaggagggacaagaactagtcgtcttgtcttctcttggttttctcttctacaaatggagctcgtgaatggtgggctgtcaggattagatgataatccacttaatgaaaggcgaatttaggatatcacctggtatgcagaaggaactcaatatatggccattatgacacctgtggccaaccttttccccaagcagccaaccagtccctgctaggagtcttctggttttctattatgtttctcagagacaacagatgaaggacggtagcagcaatggctgtgtttgtaacactcatttgtgtctgatgttgtgtgatgttcattgtgttgcaacgagaggccttccctccacctgtgtttgcagcaccgggaagaattaaagccccctccttgcacagccccagctctacgtagctcagctgggcttcaggggacccaggcaggtgctcagatctgcctacgatgatgccacttttccttgtccccctcttcccacttccctcaagaccatgtttttcatgggacacatagatggaagatgcttagaaatctgtgtccatgaaccagttgctggcagtgcccacctggaaggagttcacaggatgttcacacctggtccacactgactctggagtgccagcctactgctcttggaaccatgggggtgtcagagagtagcagccatgtttctgcttctctcactaattcagcccagaactaaatatagtgttatataatgttacgaaacaggcccattttggagccattttaagtaaactgggtatatatgaaggctcagcattttatgcgggtcacctggattctcggggaatgtgagggaatgaaccaaataggatagtttgctcttctgcttccttggtgctctcaatctggggaagactgtagagcggacacttcccttcctctcccactgcccctcacagcaggccgactcccctgaaggctgctcccggcactgcagcataggaagcagctggtgcgtgggcagggcagtgagctttatgaccactggttataaagaatggttaatcttgattggcaagttgattagctctgcagtcaggaaagatttctgggtgtgtcttggagggcttttccaagaaggattaacccagggaagaagacggtctcccaggccgggaggcaccttctggcccagttatatatagagaaaaccagttctgcatgcttgcctgtcttcttgaatgtcacggatgtcctggccatccttcagcaccctcacactccagcttctttggatcccattgtggactgaagacctgtgacccttctagaatcttccaggcctccagcttcaggctggctctgttgaggtgcccggcttcatggcctctccagtgtacaccaggcactgttgggctcttcagccctaatgagtgccccttcctctcctccacccccacctcggtcctgttcctctgaagagctccactacacacagatcctcttggaggctgccttcctgagtccatgagcctcgacttcctgtcactctgacacgaagtctggcctctacataggctctattatccctctgcattggagcagagtgtgacattggaagaggcaagcttctcccttaagtcagccaggggagctcagagctgccccaacgtcgtggggtgagggagtgcagggctgctggcccttcctctccagtagttcaggcctccagccagggcagcactagctaaccctcaggagggagaggcaaccagatgagcaaggctcttaggcaaccagggcccacggtgcgagccactcaagaggctccagagcagctgcaaaatatgataaaaatcacttgaaaagttcattgattttgcagcgaaactgcgagggcttcactttataataatcgttccctcgtgctctccaatcttgtacttgagcgccaagggcgtctgggtcaggcactgttcagcacacaggaccgtgaagacaatggcgctcaggctgaagagacactttaatcatgagctaatttacaaaccaaagcaaaacagactcaggtttttgtctaagattattagaagatgttaattctatgcttaaattatttttctcctttccccagctcataacaaggaaaaaaaaaattaaaaaggagcatcggccccaccgccctctacttcttatcttcctaattaaattttgtgacttggcactcatgggtgggtgggtgacgactttccctttcttcttttctctccgaggacaatgttcttgttattcaaattcttattgcttcttggtgggagctcctggctcctagactaaacggctgccggcctttctcctgcatttctctgggtcaggagaagtcacgaaagagtttagtgcagctcttcctggccccgtgtgtccctgaccccaaaggccccagtggtcagctctgtgttcttcccccttccctaaaggccaggaccttttagtagcaggagggtcagtcctgtcctttcctgattcactaatgtcactgtccttccaggctggcaggaccccacggccaggatttaaagtacaggagcaaacaaagcctgaactggactgactctcaattatccgcatgaatggaaggctaatccaatattcatttctccccggctttggaatgccaagcatggtttgcacaggccagatttacatggtggtttctgctttgcttgggtgactagtgttagcattttcaatatgtctatggaccgaccgcaccccaggaacattgtggtgtgagagggaaatcagtttgtgtggtagcatctggagagagagagagagagagagagagagagagagagagagagagagagagagagagagagacccagggtggtgtcactgcactggccattctccctccagtccatctctttcttcctgtttctatatcttcaatggaacagcatgcggcagaaccctgacttaatggcaaggagaggaaagttgccaattgactgattgattgatccatttacccatttgttcactaaacagttctttaatatctaatgtgtaccaggtactatgctcgggggttgggcatataacttcagggtgtttgtgggggctgacacacacacatgagaaagacagtcctgtgtctcttacaagtgaaaatgttgaaggctgtagctagaaaggggcgaggctgcctcaggctacctgtaaggcacttgatggagacttctcaggggtcattaaaggcctctgaggaaagagaatgtgttagctgtgtgtcttgtggctatagtaaaatatctgacaaaagcaccttaagggggaacagctttgttggctcacactttgagggtgtaggccatcatggtaggggagtcaccacagcaggaagtgaggtgggtggtcacactgtgtccagagtcaggaaacgcagagatatgaatgctgccagtcagcttgctttcagtttaatagtcaacccagggccccagtcatgagaacgcggcactcatgtgtagagtgggtcttctcctattagcatggtataaacagcccctcacacactcacccagacatcaatttctgtggcgattctacatcatgtcaaactgactatcaagacaccatgaccaagaaaagtcttgcaaaggaaaacatttacctgggagttgcttacactttcagaggtttaatccattaatgtcatggcgggaagcatggtggcacacaggccagcatggtactagagaggtagttgagagtgctatatctggtcagcaggcagcaggaagagagagacattgggcctgactggaacatttggaaccccaaaacctactctgtgacacacttcttccaacaaggccacacctcctaatccctgtcaagtagtaccactcccttatgatcaagtattcaaatctatgagcctgtggggccactcttattcaaaaaaccataataggtgagcccgagtcatccacaccaccaccccaatccatgctgactagaagtgcctctgttaaaaatatgatatggtttggggctggagagatggcttagtggccaagatcactggctgctcttccatagaacacagattcagttcctgggatccacagaggggctcacagccatctgtaacttcagttccagggaatccgatgccctcttctggtctctgtgggaagcaggcatgcacatggtacacaaacatacatatgagcaaaaccacttatacacacaaactaaaaataaatctttaaaacatgacgctgctttgggagtccctttccttgctatgactggaggaaccatctagcaaaatgcaaggaggaaaatgcaggaggctgtctgcttggttttggtctccagctctaagtggcctgggaaagtcacctaacacttctccccaacttatccagcttctcctgaaaaatggagacaataatagcacctggtttataggattgtgtgtgaatgaaaagaattaatttgtgcagcacatttggaaccgtgtctgacatgcaataaatgctcaaaaaaatgtcacatactgtagaaaattataacgacatgttttacaccacaaagtgccacaccgaacatctatttctcagcattgtaaatggtgtgcatttgggatagccactgggataatcatgttggcttttcctctgttccattaatgcagaggatcacatcaatagctatttaaagcttcagccatccttatggtatgaagccaccgtgattcattgttctttatctatggctaatttgctaatattttatgtaggactctacatgtcgactcacaggtgatgtgggccaacaatcttatttccctgtgttgtgcttgtctagtctgggcaccagttttatttgagcttcataaaacccagaactcctcacctttttctatatcctataggatttggtttgacctggatggtatatgaaccatgaatgtttggtagaattttccaaaaggtttatatttctctttacatagttataatttatacttccctacaaaatctttttcaatctaaattcgtgtttattggcatactattgtgtaaggagttctcttttaatgtggctgtagcaaatgcccctttccaatagcttacttcattctttcttgatcagactcagccagtctatgttctttattagtcttttcaatggctttagctctgtgattgattaaagcttctgaaagactattgcacagatcagggagacagttaagtgatacagtgtgtgcctagcatccatgaagctctgggttcaaatcacaccattgtaagaaaacaactttcgggctggagagatggctcagtggttgagagtacaagctacccttccagaggtccagcacccacctggaagctcacaactgcctgtaactccagatctaggggatttaacacccctagatacacatacaggccaaatgccaatccacataaaatgaattaaaaaataaaaaacaactttggtgtgtttctgagttcattaagccattctactttaatttgttttctcttttctagattcttaattagttgcactgttgataattctttaatgaaatatatttgggatcatccattttcttaaggatcacactcaatcctagcacttggaaggtgaaggcaggaggagctggagtttaaggtcagcctcagctacattgtgagtatgaggttagcctggtcagcatgagcccctgtctctgagaaccaaaaaaaataaaggaagggaagaaggagagtgttagcgaggactaaattcactgctttggggagggcaacctggcacagctgctagagagctcctgagtcatttctgaagatacatagtccctttaaccccatgattccacctgtatgtgtgcaacccctcctagtgtgctgaagaaaaagcttgtgaatgcaaactatatcagagatgccaaccagaaaatggccctggtagaggccaggcctcctggaggacagactcttgtgtggatattgtgttatatgcagggttgttttgttttgtttttgttttttgttgttgttgttgttttttactcgttagaacaacacctgtgtgagagatggaaaagcaggattgacagagagagaggctgagccacagagagatagtccagaagaccctaagcctacctactgcatgtgcaaacctgggatgtgttcagtggaggcacagaggttgggtgtttgtgttccttttaagcaggcctttctcatgagctcttccgggaaggagtgtattcatagcagctacctttgactgagggaatgtgtaaatccagcttttaaacttgtcttgttcctatatggggtcttgtaaccacatgtaggtatggagagaaattggtcaaaagttgaaacttaactgaacacataatgactaaaaactaagttagaatcaaacacttaaccaatccaggtggtttggggccatgctcacctgtgttgcctgggacagcttcactacagcctagcagtgaacacacagcatacatactctgaagtgagcatgctcttataccaagtaacaccaatgaacacttcctgaaatggctcagttcaaaggacctctactggggtaagaactctccgtgttcctgtatcaggaacagtgctgtctcttagagacttagactgcttctgagataccaaggatggaaataagcacagtcacagtggggcagcagagggagactctgggtctctgacaggcaggccattgctttcaagtaaaagatgccagtcagacatgaaaacaaacaatcttgtgtcctggctacagagtggaggagaacagccgtcatgtttaatagaaagcaggtccaggagccttaagaaaatgagtacaaatctttcttttctttttgatttgtttctttcaggttttttatttccaccaggaatgcacaggcacgagacccccttctctgtcttagaattgatcacctctgggcagacattcctggagtctattgatagcagggcaggatcaggaagtggagacactgggaactgattaaagagcgtatgggaagaatcaattcaaattataccaactgagttgggattccatgaccaagcaatgttgaaacaaaatggctggtcagttttcatctccaatggagatgtcatccaatagtcccccttctgggaataatgccacaaacaattatagaaaattgactttatacctgaattcccaaatgaaagggaaaagttccaggcacctgaattctcaaatgaacaccaaaatattcagatgtaatggcccggaacaatgtaccagcaaattgtgttctttgaagctagctaccaacatgtgtggaagtgttggtgcaagaggggaccaccaggtgacagacctggctggggttaatcaggagggctcactgactgtggattttacttgctttttatgcaaatgaagacacaggttggggttgcagagggagacaaattccaggtgctgggatctgttccctctgtcagtggcttcaggcctcccctttgccatctccatccacctgaaatcctgggttccacccacccagagattgcttgaaggagactacactctaagctttctctgcagctctgtgagttggcagacagcaccgcttggcgccttcatgtttaaagaagtttttattatcgtttattaattatgcatagtcatgcaatagtgggttttgtgatggcagttgcatgcagatacgtacaaatttatcttggtcttatgccccatcgactcccgctgatacccctgctctcctcggttacattcccttctgtgggttgatggctccattggtaaagtgttcactatgcagtatgaggatccacgattgggtttacagcactggtacatgaaggtggcacagcagcatggatcagctaaccagccagttagttccaggcccagggagctctgcgctggcgagttttatgtcaacttgacataagctagactgactttagaagagggaagcacaactgagaaactgtccccatcagactgtgctgtcaacaagccccgtggtaaaatttcctgattcttaattgattattgatgggggaggacccagctcaccgtgagtggggccatccctgggctggtggtcctgggttccataagaaagcaagccatgtgagcaagccagtaagcagctccccccatggcctctgcatcagctcctgcctccaggttcctgccctgcttgggttcctgccttgactttcttcattgatggactgttacttgagagcataggctgaaataaaccattttctccccaagttggttttggttatagtgtttatcatagcaatagaagccctaactaagaccctgttgcaaatagtaagttgttgttgttgctggggtgagagagggaggcacccaaccctgatctctggtctccacatgcacacctatacaaatttaggggtgaacccactcagagcttctgtctgaggtctccacagagcagtcttccaagaataggaaccaacacagggcaagagatcaacacacccagtgtgctgcccaccagacaccatggtgtcatggtgggcataggatttagaagcaaacctctttctctgtctgcaaagagttgaatggtggaaatcctgcccatgtcttcacctcagctggccctggctgcatcttgcttcctatgtgccagccccacatatcttcttgtttgtgaactggcaccatcttcttcatctccggcctttgtatgcttgcttcctactgtgtccatgggcattctctccatacccctccacagtcaactcttttttaagtaagaccagttttcctgcacaggagataccagctcataaagatcatgactctttaatatcacaagctcaaaatgtacccctcctcctagaatattactaccttggaaaataaatatgtgaccaatgaagcacttgacccgtggaaaggaacccaggatgccctctctttgtcatccagtctatgactccctctcccctcatgcccacccccattctggaggcagatgtgagcctatagctcctgcttccttgtgagttagtagtttgataaagctgttccttttttgcaaaaccctagttcagttctgtcattcagatagctattactcaggacccttcctacagcccattctcctgtgtgaatttctcttatcataatttctctctctctctctctctctctctctctctctctctctctctctgtctctctctcccaatttctctgacaccattaagagatgaaaaggacctggattattttaaaatgtattattatatgttcgtgatgcaagcaatgagcttcatcgtcctattttcatacaggcgtgtaacattttgttctcgttccattccttccgaccctttcaaaccgtcctccctcatcttcctaagtcccacccccttccataaatagttcccttctacttccatgtctctcctcaaccacagaccccatatggaagagggaacatttgatgctacttttctgagtctggcttgtctcatccaacacgatgctctcaccttctacccatgagcctgcacataacttaaattcattcccatggaggaatgaaacagtatttcggattatgccatgtttcctttatccagccttccattggtgtgttgctaggttgcctccataactaaggtatcatgaatagggtcgtgacagacaagagtgtgtgagtgtatctacagtgtacttgcttttgctcctgtgagtccatatggaaggtggtgccgcaggtcatgtgacagtcgtatttttatttttttgagaaattgccatatcgacttacatagatggtgaactaatttaccaccccaccaacaatgcgtaagtgattccccgcccccatcatttatagccaacattttctggatcttgctttattggtggctgctgttcagactcaatgagatagaatctcagtgtgattttgaatttcatttccctgatggctaaatgtgttttcccccatgcatttattggacatttgtaattatttatttgaaaagtatctgttcatttcattttcccatgtattggtaagtttattcttttgatgcttgattttcaagtcactttcttgttctggatgtttgtgctctggcagatgaatagcagtgaggatttccccatttttcaggctgccttttcactctgttcatcgctttctttgcagggcagaaactaacaaattagaagccgttgcatcgtcacggcttgctatcactgctgataacccgagccctattcaggagtgatggcctatgcgtgtgtattgaagtgtttttctgatgtagtttttctgatgtaggcctttgtttattttgtgagtgagatgagatgagggtatacttcccttcttctacatgcggacaactcactttctcagaactgtttgtaaagatgctgtcagttttccagtgtatccagtgtggagggagtagatgccctgtgtcattctgaattaagaggagatgttttcattttccccacccagtgtaatgccagctgtaggtttgcttggtacctgagtaccagattgagatgtaatccttcaagacgtactttcttcagggctgctttcttatgaaggggtgttgattttgcaaatgcttttttctgcatctattaaaccgtcatgtgatttattttacttatgtgctatattacaaatggtttgtagatggtgagccttccttacatccctagaatgaagtcaatttgactatggtgtatgtttaaatgggctactgaattcgattttcatgtgttctgttaaagatttttgcattgatttgcttatcaaagatgcttgtccatggccttctgtttgactgtgtcttgatttggttttgatatcgtagtaatagtaactttatagaatgattttggaagtgttcattcactttctttttgttaaatagtttgagaaaaattggtgttcatttcttcagttgataaaatttaacagtaaatgtggtctggccctttctttgttggtatacttttgtattgcatcaatttcactacttgttattggtatgtttaaattaaaaaatattttcttagttcaatttttgggattatatgtctatatattttttgtttcttaaagactctctaattcatatgcgtctaagctttcaaaataacctccagttttattaagtgcttttatgttgtgatgactatcatggtcaaaggcaatttaagaaagagaaaatttgttttggcttatggttccagagggacgagagcccatcatggcagagaagcaaggtgacaagtgtcagtcacggagcaggagcagggagctgagaagtcacatctttaactgtaagcatgaatcagagagagagtgacctggaagcaggacaggctatagattctcaaagccactctgcaaagtggtgcactttctccagcaagattgcaactcccaagcctctccaacaactggggaccaagtgttcaaacgtctgaacccatgggggcatttctcacacaaaccaccacactaaaaatcctctgttgttccctttcatattatcctagtgtttctgtttttgttttcccactttcttgggtcatttgcctaattgatcttttcaaaagcctattattactattattattattactgatcctttgtattgtttattctgttttcactattatttatttatttaatgtgtgggtgcacaatactgtggtgtaactgtggagatcagaggacaacttgctgaagtaggtcctctcttgccaccatgtgtgtcctggggatgaaactgaggtcatcaagcttgaaggcaggcatctctacctgctgagccatctccctgactctgcactgttccttaatgctctctttcagtagactcagctctgatctgttcttatgctgccttgcagtttggcttctccttttaataacactttcaggtctatcattgggtatttattttatcactgaatttttaatgtgtgtgctcataactgaaaacttccctctgtcccactgactttgccatgttgcatttccattttcatctgcttctaggcactcttacatctcctctttggtttctttgctgctgattgattgttaaaatgtgtactgttcagggcttggagagatggcccagtggtaaagaacagtggtttctttcccagaggtcccgagtttaattcctaatgcccacatggtggctcacagccttctgtagctgtgatcccatggaatcccatcccctctgtggtctgcaaaggcatacatgcacataaaccactcatataataagataagtaagtaaaaatttcaaaaatacataaaaatgtgtattgtttaatttctgtttctgtctagactttttttactgttaaattctcatttcattccatttttatatgatgtggtataaaaaacatttctcattttgcattttctttatgatctaagatattttagaaaaaaaatacatgagctcctgaaaagaatgtgtattctatggatattgggtagactattctctctattaatggtagatagtgtctctaaagtttgtttgaattatagtgcagtttaactctgagatttatttttgagtcttctggtatggatgagagatggagtacagcattgaagacacagactgttattgtattaggccccatctgtccctttgtatctagtagagtgtatttcatgaaattgagaatactaatatttaatgcttgtatatttacagccattatgtttccttaatgtttactcttttataattatatagtaacactcttgtctcttttggctaatttttgtttaagggtgactttattggatataagtacactcctgtttacttccagattccatttacttaggatacaatttttaatttctttgtgtgttttgccagtgaggtgagtttcttgtaggcagcaaatagttggatctcaattttaattcaatcagtcaatctacatgttttaattggataaataaggccatttatattcagtgttatagtctgaggtcatgtacaaattccatcattttattgtttttataatgtttaattcttttctaagtctggtttgtttatctaatggggcttattcttttctgtatccatgtgtgttaggattcaggctttatgctggcttgccctgtcacctctcaggatgtacttagggtcctatggctgcactatctagtgtgcacacaggtgcaaaggacctgttaagaagaaagtgccacccacttctgctctctctttcttgctgttcctctgaagagccaggcaggatttttcctgtctctcctctctctctctctctctctctctctctctctctctctctctctgtctgtctctctctctgtcccactctctttatcttcttccccctcccttccccttctccactctcttctctttctctttcccccaataaaacttcccactcaagctctgtctgcctgacttgcttatccctcacctgccatggaatccatcaaggtccccctggcaccgtattataatagtatggctgtatttttcatctctgtgtaggattcctttacgtatcttctgcaattctggttatgcattcctttaggttacatatgtcttagaagatgtcttagaatttctctggatgtgaagagacaccatgaccatggcaactctcacagagaaaacatttaattggggtggctcacttacagtttcagaggttcagtccattacctccatgatggggagcacggtggcatgcaggcagatgtggtgctggagaaggagctgagagtcttacatctttctggcagcaggaagtggactgtgactttgagtgaagcttaagcaaaagaccgcaaagcccaaccccacagtgatacacttcctccaacaaggccacacctactccaacaaagccacacctcccaatagtgccactccctttgtgtggggcattttctttcaaaccacagatgctttctgtttcttgcttgatttccttctttccttcctttccttctttctctctttctttctctctttctttctttctttctttctttctttctttctttctttctttcttgtttttcgagacagggtttctctgtattgctctggaggttatcctagaactctctctgtagaccaggctggcctcgaactcacagagatctgcccgcctctgcctcctgagtgctgggattaaaggcatgagccaccagcacctggcttcttgcttgattttcgaagataatgctgatgaacataacaacttagcattcattttccttcagaaattggaattagccacaccctggtctcttcacagttaaggtttctgtcgaggtatctgcttttgtttaaatctcatggtttaggctttgcaggtaatctggtgcttctccttcacactcttggtgttctttgttctaaacttggcatttaaaccctaattgccatccaagacccttcatctagtagtcgatggaagcagaagcaggcacccacacctaagcaatgagtcataactcccagaatccagttgtagagaggaaggagggatgagcaaaggggtcaagactgtgtggaggaaccaacagaaacagctgacctgacaaagtgggaactcacagaccccagtcataaagctggggaaacagcactgaaccaaaccaaagccctctgaatgtgggtgccagctaggaggtctgggcaggctacgggacctctgacagtggaaccagtgtttatccctagagcacaaatggaccttgggagtccattctctatggaggtatccctctcagcccagatacaaggaggagggcataggccctcctccaaatgatgtgacagaccttgatgatccccgatggaaggccccaccatccttggggagtggatggtgggatgggggggtcatgggaggatgggagggagagagaactgggattgatatgtaaaacaagattgtttctaaattaaataaatttttaaaaaataaaaaaagtgctttttcacgtggaggctcattcctggtcttgtctgtttggggttctaaatacttcctatgcctacatgtctctgtctttcctggggaaatttctgatgttacttcattgagcaccttttctatgctttgattctataattaagcacattctagataaaaatatgtaaatgtatctttcataatggttatggtttaatttgaagtgttctccacaggcccatgtgctttaaacagctggcggggccgtcagataaaagctttaagggttttagaggtggggagtagctgtaggtcactggacacaggactttgcaggtgtattatccctggatcctctctgtcatattcgctctgtttttctgtctgccactgagatgtggcctcctgagacagcttgccactttgccttcctcaccttgaaaccgtgagccaaagcagctcttcctcctgtatgttgcttctgtcaatcattttgccacagcaacaagaaaaacaaccgacacaatcatgtcccagagattctgcatgctttgtttgcattcccactttttctttgtcacagtcttaacccatcagcttttctttcaagccctggaattctatcttctgtgggatctattcatgagatttttttttcccacaaaacttttatttgacctgtttaactttccatttccaagatttcggtttgttgttttcttatctctgtattgaacttcttagccatatcttatatattgtctctcttaattaattcagctgtttttctgcatcttcatggaatttattggtccttgtaaaagttgttcatttgaagaacattcaccccaatatttctagagtccactgctgatgagtgatgaactgtggaggagtcacactgcttgcctggcccatatttctgtgtactgagtctttctctgtcctaccagccagctcccaaataatgacacagcgacttcttattaattatgaaagctcagtgtatagtttaggcttgtttctagcttgctcttataacttaagttaacccatttatattaatctctgttgtattaagtcgtgttacctcgtttccatcttacacctcttgtctcttctccatgtctcttggtgacccacctttcttcttcccagagtcctctctgtccctggaagtcctgcctaaccccttcctgcctacctattggccattcagctctttattaaaccaatcagaaggtgccttggcaaagacacagcttcgcagggtaaacaaatattgatgtttctttggtggggaccagtgcattcagccacagtgagcactgcattgaagccataggtcctgctttctctgtaggtttaacaaccgtgggttctttaagggtaccaggcagatgtggggcagccaggagactctgtgcttactcttctagtctcatcaacagtgtatgatctgtaagcatgtgggagttacctctgctgcagttcatcataagtgtggcgtccatagtatttttaaaatcctttctctcttccacagctctgtgggtagatggccaagggtgtgtctttaagaacacctccccatctatacatacttagaacctggttgttgtcttggggttttaatctcatagattctttgagtaaaatgtttactggagttctagtgggagtgggtttttgcagagtaatgtgcgtccttgaccagggctggatagcgagggtcagcagtagagcagctatgtaacacattggagatgttgtggttgacttcccagcattgtgtaaagtggagagcagcaaatagcagtgactcacagagataaactaaaagttagacaactctagaaacagcaggaatgccaggggagaaatgactttgatcagaacttcttaaaggacgtcaatttatttatttatttatttatttatttatttatttatttatttatttatttctggtctttgagacagggcttctctgtagctttggagcctgtactggaacttgctcagtagaccagactggactcaatctcacagagatctgactgcttttgcctcccaagtgctgggattaaaggtatgcaccaccacccagcttttttttttttttttttttttttgtagaagaaaagggataatagcaaaacaaaacaaaacaaaacaaaacaaaacaaaaaactgttagagtatccaaagtggaagtagggaaggctaggaagaaaacagtggaacatgaaggctccaagtacacatagagagagtaggggagagggagggagggagacagaggtggagggaagcattttagaaggacaagaagagagagcaagggaaacaaaagaagacataaaagagatgaagctaggctttatggtccaggcctacaatctcagctatgcaggagactgaggcaagagaatcaggatttcaagggcttaataatcttgcagaggaacttggttcagttcccagcacccatgtggcagctcactactgctcataactccagttccaagagatccaagtctcttctgattctcagcatgcatgtggtgaacatgtatacacgcaggaaaaaagctcctatgcatacaattaaatgtttaagaatatgttaaaaattacgaagtattgttcttgcttgggtggttatacaggccagaatagagatccatcgcctctgccaacttgtacttcactatgtgtctcgtacttgtgattcttggagagagagagagacaaggcagggatatttactcctttttcatgtgttgtccctctgccagtcttgagagtgacctgggacagtagctgtgtggacatgcttcattctcctgtgggttagcactggtcacatggaaccaaagatctctcacctggagttcaggctgggtggactaggtcttctttccctgtggccgggctcataccagatggactggctcccaggtgcctcacatgaggtccacaaggagactgagtcaacagaatgctccatgtggagggacacagcaggtctcgagctttccgtgactcatgactgaggcttttaggagatcaggctctgcagagtgtctgtgtctacctgacttagtcacatctcctaagtgctgcacaacctgagggcatgttacacagaaagcaggtgaccttggccaacagatcagctgtgcccacttgttagaatccatcaggagaaggcctgtgtaccactggcattcccccaaagaaggagaggtgaggaggttccagctgctctcatcagccatttgtacttaaccctgccctagctacacaggctcctggaggtgctagaatgcatgggctgtgggtaagggtggggctgtaactgagcagtttccctctatgcagtcatgtgggagccatttattcatgctggtgaagaccttccagtatggctgctgctctggggtcacccactgtcctgccagtaaacactcaccatactctgtaaccaagaccccaaaactaattgacttcctagggtaaacttagtagggctgaactttggtttctcattgggactttatggggatggtgcatagctgtttacctctccccagggaaggattctcaacaccttcatcctgtgcctctgatcccaatctcactgcatgaagctttcaatgcactcgtgtcagggatgctccgaggggccacgctggaccacaagggagaggctgtctgggacaacatctcaataattttgacctcagaggaaagggaagtttgcccacgaccatgtcctggtgcctctgcattgttccatccttccacggctcccatcagcctgccttcccaccatcagctaagctcagcctgcctttccaccttcagctaagctcagcctgcctttccatcctgcaccgtttcgataccatctcccctctgctccttgctatctctccctctctactactcttcccctgtgctaaccccacccactcagtgctgacccactcaataaccagagtgtgtgggtctcacctggtttccgatattagacatcagtacgttgcctctgtctctgagaagctgtgtttggtggtttcagttctgggctgtgagaaaccggaaatccctgtttctctctagtccacaatgtgtttttgacccatccagtctcagtggcggaagacaggtgccccgtgggcagggatttccttgttccacattctctctccagctcctaggacaaagcctgcctagagagatgtgtgctgtctgtcttcctccaatcagtcaaagctaaatctgctctgataggaaagggcttgccatttggtgaggattgatagcaagcctgaagtcactaccaattatctcaaaagttactgcttgcttaaaaaaagaaaaaaaaaacatgaccaattttaagaactttgtagtttttattatagaaagattcaaattttgtcttgtttatataccgtctacaaagagctctcctctatggtgctgcttgagcctaatcccgggatttacaggagagtcaggactggagagagccagccaggtatggagggttcgtgcgtgtggaaagggaaccttgatgacccacctgtgtgtaacctggacacccagagctaggctgtcctgtgggccagaccagcttgtgcccattgcctcactggagcccagccctgactcatagaatctcatcaggaaatacttaaatgtgtcttcatccctcttgaaacaaaaatcactgcaaaccaagtgtggtcatggatgcctttaattttaccatttatgaggcagggagcggtcgagctctatgagattgagtttaccctggtctacacaagttccaggccagccagggctacacaatgagaccttgtctctaaatataaaaatacataaaatttaaaaatcactatataaccactatcatacataagagtaaaaattgcttggtaccctcatacatccagtcagtgttttaattctctgatgattctataatacttagttgggttgaaggaaggagtcctgtggatcaggcttgatcaacagggaacaggggccaaagcttgtgtttagactatccatttttgtatctctctctttctctctctctcttccttccttcctttctttcttccttctttccttccttctcttctccttccttccttttctttttttgcttgttgtttgcaatttctagtttaaaacaaaaacacgatgaaaaacatgtaaagttttctgcacttttggttttgcaaggacattgaacatgttgtgtgtattcctcttcttcaggtatgccctggaaatgggtaattagtctagagacttgtttctattcagtgtttactaaagggggtttgacggctgatggcccatacatctatgtggaaccacacctgtatggtcttcctcttgccatgcaagctaaccctgatgattgatcactgccttgattggttctgtctgttacagaatggtgacattcaggttaggactctttgtctaactgttatctggaacattttgtaagaagaggtagttcatgatcagttctcagttcctctcagttcacacaaacaatgctgtatcgtcggcttccttgcagtaggcgattatttgtttgtttattgtgtgtgtgtgtgtgtgtgtgtgtgtgtgttgagaaataatgtatttataatgtctctggtgtgggaaagcacatttgggtaccaaagtacaagcacaaaactgtctacttttattgtctgttagaggcatgaagggccatgacggttgggagtctaagacagagcataggacagaggtcacttaggactgggttagcagatggagaaatgagtatggaaagaaactactccaagccttccctccatgctctccctcctccctaccttgtcctcctcccaactctgaacccttaagcattatgaggtaacaaatacttctttttcctcaataaaaactgctcctggtctatgaggtgtggggcaaatcggaatggggttggtgattgggaacttctcaaaggacaactgagagaaaaactccatttttcttttttaaaccaaacattccagtttaccttctttcgcctcatatttggcatagtcaatgacagtattttgtagtcaatgccaaaagggaagcagaaagaactgtggttccgggtaaaggctaccagcagggacaagaggtggagggtgcttgttgctctcatgtggaaagctggggatggagtgtccaatgggtccagaagaacacgggcttgtaataatcaccatggaaacagacccctgagcgtgtctatgaaagagagttttgatgagttaatcgaggtaggagaactcaccctaaatgttggtgccaccatcctgtgggctggggtccctgacaatgcaacgggaaaattgagatgagcacctgcattcgtttctctctgcttcctgaccatagatgcaatgtgaactatactacatgctcctgttgccatggcatccctgccccgatggaccacagccttagactgggagccagaataaaccctcttttccataagaccctttggtcaggcccctgttcacagccacaggcactggcaccgggctctctcagtccctgtgctctgtgagccttccccctcctgagcatctgtgcgtcctacagggtgtcactgcctctggggtcaggggcagcatctcagttggaaggaaatagccacctcttcagactgcctggggtggtttctgttgttctgtttcaagtgaaagctgtaatcacatttctgaaagcagagaggttacttcctttattgttacctgattctaagttgacatttttttccacaatgcttttccataaaccttattgttcagatagagacacaatggaaatcaattgctaattaaatttgtgtctaaattaataaatcacaactattcagatcatatctgtctgaataatttctatcacggtgaacataattgttagattcagcatttaatgaaccatattgttgggtaaaattcttatgacaattgagactaatagaataaattaacctttatttttcccagcttgacactacattggaccatgttaacacaagagcacctgaaagcttcatcattaagtggccattgtgactctcccacccttctgacggagcccaggaggctttgagaatttagcgatgtttgatgttcagcaatgggtatcttacttgtaatgagtttgggggtatttggttctgtgtctgcatgttttcctggcatggagactgtgggctccaccaaaagtcaacaatctgtttttaaattttaaaagatgacaatctctctctctctctctctctctctctctctctctctctctctctttctctcttcccctctctctctctctccttctctctctctctctctctctctctctctctcttcctctctctctctctctctctctctctctctctctctctctctctctctctctctctgtgtctgtgtctctctctctctgtgtgtgtgtgtgtgtaagtcagagagcaactggcaggagtcaattttctgttactagcctgtgggtccttgggatcaaaactcagttcatcaggcttggtggcaaatgcctctacccacagagccatctcgctggaccaacaccacgttttgagcacccacctgtagagcacagtttatgttccacaatgagtgcacagtgaggatgctttgaggaaatgtgagtcccctcctagagaagtacagtctagaggggaaaacaagggtttttccgaggaagccaaaaggaagtagcttcagggattcctgtcaaattctgactcccgagttctgtggctgctttcttgggaagggatagcaaaatttgcagaccttgaatatcagccattttgaaatttcaccatagcaacccattctgatatcactgggactcttatcccaataatggcctaacctttgtaacaagaaaaacggccccagtgtggctggagagatgatctgcaggtaagagttcaaatccacagtgcacaagccaaagtctgggtgaggtcacacaagcctgtgacttcagtgctgtgtcatggcggggccgaaacagtgatggctgaagcttgctggctgcagcctcacttcaggttcagagagagattctgtctcggtggaataagttggagagtgataagcaagacagtcaaaaccttcttctgtcccatgtacacatggacacgtgtcttcaccacacacactccacactggcacacacgcaaacatagatacacatgcatatatacaatgttaaagtggccctcacttggagcaaagagacactaggtaatgtgtaattagtaaggaaggtgatagcctagaacctggcagtgccaacagccaacgccagacacagtttcctgcacactcagactgaccctaatggtgactccacccttggttttattttctcatcaattaattaccaatccacagaccaacctggggtgcaaaggtttgtcacttgagaggtgactacaagacaggcccagtagatcacggtaggcacaaggacacttccttctccctctgcctggcttctgcttcttgcctatgtgagggagtcagaatgaaattatgggatgcctgctccagtatgacagctgtgtagccatgcctgtctgctattcatagcaagctgggacccatttctccctgttggttttggttttgataatgaccttcttatgggggatatttggtcagcatcattgcttttgctttaagcaaatttctaagaggaaagcaaagccctggtgacttatagagaaaggaacaggacaagttctgatcccccaagtgcgcacagcccttactcactccaaacaacagtctggagaaaccaacatacggccatacctgatttctgtcactcaggatttccatgtctgccccattagactgtgattaaaatggagtggtttaatctagggacatttccaaagaaaaggcagaattggttgggcacctgggcaggtgggagtgagcagagaagggtggaaaggtttctcagagggagacatggaactatagctacccatgggaacagcagggcatcacctaccccgggtctgccctgaggtacagagacagctgacctcaaccccttctaagaatctggcacctcatctctctctcctgaggggctgggagatgctatgcctctctgaagttgaccttccagattgtcaccctccctggcccacacttttctgtctaagatctctgaccacagacctctgactcatcttagctccactgttcctgcactcagggtagagggaacagcttctcccatggcgctactgggggttgttgggtggatgtcggcagtagctcggctctcctcagctgggattcaggtccccggacaggactgagcctggagacagccagtagaagggactaggagcccagagcagcctgcactgtacctgctctctgaaggcgcttctgagaggaaacatgaggccgtgccgtgcggttgcttttgggtgggtgggacaggagcatcctgctcatgctgtggagattatgtgctcccccctttccaaagccatcagaaatggcttcagggatgtggcaaaaatgaggtgcaatttaccaagcaggctgcagagacctttctaggacacggcaggtgtttctgtttgggtgcaaagatgtttagttttgaaattactaaacagcttcgtcgtcgtcttggtgattttgtccttttggtaatctgggcgacacacatatgtatttgtgtctgcaaattaccttggaaaatgcatattatttacttgttctgaagaggctcttaggctctgttgtctaaataggaaatttggatctaataaaatgaggctattatgggctcctggacaaataataatggagactaataccctcaaaaattcaaaatttaaagaaagatagtcattttcttcgatattgggagaaagttcaaaacaaacccatatatctcatttctttcttcattctctccccggaacacaggcaaggcagcacccccagatatgagacaaagtatttcctagagctctgatggacagtgggaagaaaggagtggttgcctggatgggcggatcagggaggcctacatcataacatcttggatgaactcacaatcctgagctgtagggagcggcgtggcgggtgcatggtgccagggacttaggatttgtcatgggtcccgtttcaccatttgcaaacttctttttcatgtcgtcacctttctaatgccaatgtccagaatctgacttttctactgtctatcttcccgttctttattcctttgtgtgtgtggatgcatgtgtgtgcacacatgctctcacggatacatgcatggctgtgaacacagacacacacagagagatgcatttgaggagaggtgactttgaatgtctcacagtccatcttggttggaagggcgtggttctaggatcacaagacagctggtcacattgcctccattggacacacagagaggtaaatactggtgctcggctcacttcctttttcttattcagtctgggacctcagccaatgggatagtgttgcccacatttaggacaggtgtccagagatctgtcttcaaggtgattcaagatcctgttgacaatataaccatctcatcatgctaccctgtttcttttttgaaattcctatagcttggtcataacttagcctgctgatgtcttctctggaccttggttttgtcatctagaaaataattacggcagcttttctctttctatgaaatcttacttatactttcagttgatgagtcatgcatcagagcaggtttgtcaagaatgagttagaaaggagccccaggactcctccttcccatccatctctccaggggctctcccggattcatggctgtagttttacccttgggactagatgaatagtagctatttactaggttagtggccactgctggctcccagggtctggttgtaaatggggaaagagctctggcctttgtcctcctaaattttcccactttggatgaaaaggctctatcgcctgaggactcccaagccaatctcatgaatctggacctttggacaactcttctcccaaacagcatagtctcaggtgactctggtggctcggggtcattgtcctaatgaaagtcaccagaatatggtctgtggctcccagaagcagggactgcttttctagtgttggggatgaaagagcatagaacacttagcaccaaggcagatctcactttctagaaacttccttggtgaagtttcctggaggagaatggcttggccacttctatcccttctgaacaagtctcttggccttctgatgggccagcctatggctcctagagccctaggcttcctaagtgatagtgaatggaatgtcaaacctatctcacataggtattttttttttttactatcttaatatttgttacgttttttgatttatggtggagttggagtcatttcaggtcacaaaactgcacgttagatctgcttcatgaaacactagagtgaacagtttaatcatttatttcccacctttaaatcaatgtagctgaagaattgcatctcccctttataaatctttctatttatttctggcttgggtttatgggagggctcagctgagtctgtctgccatttcacacatgaccatagaaacctgacacgcactgctcgtcacagcgagcaaacctagacggaataggctaaatcagccgcaaagacatttcatctgggtggcttgggaggtgtgctctgcaggtgacactttctcatgccgctggagatcacctcaccctcatctctcctcagcggttgctcccgctcgcacttcaagctaccaagtttatctaacaggaagtgaaacttagccagcaaaggttctgtggatagccattatgagctgccccgaaagagagggtttagacttacgtgacagagatggcttggggcagaggaaaatagatcaagatgaattcaggccgtaagtatctctgctcagctctgttctttctcagggaaggctgtgtccaaagatggacacaaaggcatctcatctctcaggacaggctgagggccgtgcccttgaggtaaatctgggaggtgtgtgactttcggtactgaacttggtgagggggatatggctgtctcaatgagaatgctctccatagcctcatacattcgaatggttggttctcgatggttggaactgcttggggatgattaggagatgtggccttgtttgggatgggcagccttggaagcggtgtggccctgagggatgagctttgaggtttcaaaagcccacagaaggcttggttagcttcctttgcttcctgtttttggatcggggttcaagctctcagctactgctccagtgacaccttcctgcctgcctgcctgcctgctccccactatgatggtcatggactcatcttcaaaagtgtgagcttaataaactttcttcgtggtgtcctatctctgcaatagaaagataactaagagaactgtctttctcatcttttcccgaggtaaccatattttaatgtgaggtcaagccacaggcttgtcatgcttccatgctttagttattttcagttttgtctatggtctagtacatggtttttgttttaattccaagggtatttgaaaaagtataagcattcagtattctattacaaagttcagagtctatttattaagttgggtttatgatgttgatcttcaaatctgttatatccttattatctttttatctattgatttcttctgaaatgtaagtgaaaatctcctgctattatggcagttttctcagtgtttttttttaatagattttgccttataaattgctttggctttttataagtgccaatgtttcatgaaggctgtgtctcctttatggattagaactttattcattgtaaaatgttcacttttacttttattttacttaacttacagttgcagatatgtacatatgtttcacatcatttatttttaaaatattttctttgaaaatgaaaatcatgaaggataaataatatcacccaaaatgaacaaatactaacacctttcatatgtaatttggattttaaaaaaacattaaaaatattatgtatgttcatgccattgtaaactggtcttcttttccacctggtcccactgcccttcagccccaaataaacacacaaagacttatattaattataaactgtttggctgatggctagggcttcttactggctagctctctcttaattattaacctataactactaatctatgtatttctatatggaagagaatagtgtgtgttagaggcatctttcgttgcaaagggaataagcaccggactactagttttcagcaaatgcttacagcgctgtagtgcttggatgctcctgaaggtttgtgtctaacaatggccccagcactccatctcctccatggagttggagtcaccaggttgataatttgcctgctcactcttctccccctcccaaacacacaaacacacaaaacacaacgatgtcaagtctttatgacaaagataatctttccatgatctttgaaaaggcaggtgcataatattttccttaggtatttactgtttgtaggaaggctaccctaatccatcgtttattaaaacaggacaggatttattaaattgcttcaagtttatcaaatacgaacagatctttacataaattaatttgcttgttaaatatttgtgaaattcattaagactctggaggaacttaaatatctgagtcacccagcttaatttggacatttttttaaagcctgaaagactgatgatttgacccagatgctgagggatgtcatgagacaatgtcgtcatttgagaggagctcgctattgagtcctggagacattgaaatggagaggcacactacagacaagaaatacaatgtgtagtggcaacccaagggagcacacactcaaaggtgacttcacggaagaagtgagtggctgagctctacttagtcaccacctcttcagaagaacatccattggcttagaattctgggggagcccaatatgtattgtttcaaggaacctggtggactcgggatgctggaacctggtggactcagggcaaggtgggaattgtctggacacagacacccctgcaggagaggcaggcaggcagttgcaataggaagcagcttggctgtgtttgttcctaggtaagagctcaggaaacactgtgaaggtcagtgtggtgttagaacaaaccagggcagggacctagccagcaagagtgaggatgatgcctttgtgagtgggtcctggtgagggagtggggacatttctgagaatgtctttgtggtgctgttcccgctgtttccagaagaggctctttgactcccattcccctgaggatcccaccaaatgtcaattcacacccttttccttcacccacgacccttctcctctacagaagttgaaaggggagtcagcaatacacacggttagtcccacacagcaataaagctaaagcaaagctcatgtgagctggcagcacacatgacttccttgtactcttgacttgctccgaggggttcttggaggctgatttcttcttacttctcccttgactctgcaagatgaggtggggccctcatctgttgcctggatgcccattcatacacaggtgagcatgctcacacataggacgatgcttcttattccaccatagtggtcctcctagcaagcttttggcacttagtggtcatcagaggaaggggactttgcctcctgacaaggccagtgtttagactctttcacagaagggcatcaaggcagcaagctcagtagtgctgttgaaggactgtgagagggaactgggtgctctaacaaatgtctatagagtagtttgctgtgaatgggcagtagtagggaactgtaggaaccctttatcttcttgggtgcagagagctttctagagtaacagatctcatcttgggtggggtttccccttctggtaccttacctgcaaagacttcttgatcctacagtgtctctgcctcactgtaaggcgatgggtgtagacactcaattgggcttggttctgggcacagccagatgcagaacctgctgtcctgtgatgaatcttccccattcgccagacccaatgttcacacacccaccccaactggctttagcattgaaggcacctgcgaaaatgctacttgtgcctggagcaaactgcatttcttatcttggaggaggctgattaacccattagcatctaacatctggagtggatgaccagaagccaagatcaaagagggatggcatgggtacctgagccaagagcagagacttacctggaaggaaggtggcacattggagtctcagagctggaaacaggtacatgttaggtgcatagaggacagatgggaccaaaatgaactgtctacagttgaattttgctgggacctagctgcttggatccataggcatactgtcagcttgggacccatctgctgtttcttcctgcataatggctgcctgtgtgggttgggttgcaacccaggagttgccatagttatctattgggagagctcaaactgacacatgaaaagtgttttgtctcctgtccttgacataactaaccacctaccagtggcggagctctgtggtgtcagccccctgtttgttcatcgtcttaatggtgggccagtcatactggtggatggagacctgcttccctgcattttatgtcaaagtgggtcttggtgtgaaggattctccaccctctttccatgcctataatgagggatgagtattttgctcatctgtcatgacttgacaagctgctgaatagcacttgttgacttggatgctacgtaacaggctttgcccggagagatgtgttctggtgcttctgtgtctgggtccctctgcctgtgattcctctctccctctgcatatatggccagaacaattcctgaaaacattggtctccatttcagttgttcctagagtgcacatgtccttgggtgcagtatggctttcttccttcgtgttcagttcctttcttagttcctggtctgactcagcagggtctgtgggggaaagagacatggcaagctgaagggggaagtccttctgtgtatatgtttgtcttattggttgataaataaagcactgtttacagtgtgtttaaaaatatacataggtttgtgagagaaaaagaaacaggataaaagaagaaatagagtagctgggtgtggtggcacacgcctttaatcccagcactctggaggcagaggtaaagcagatctctgtgacttcaaggccagcctggtgtacagagtgaattcaaggacaggcaaagttacacagagaaaccctgtctcataaaagggaaaaataaaagtaaaacaaatagaataatgaaaaagtcatgcaaagatggaaaatacacagagtctggatactgtatgctattgtgttgtctttgaattgtttattgctgggaaggagcaacaactactgaaagacatttggttatcaatgctgctaaattaatccaacttatatattttaaaaatgctttgacttctaaatttaaatataaggacaggttacttgggaaaagagtttttgcttatgtttctacagaaaatggaaagctatggattccttacagactaatatggtttgataaagcaagaccccctgaaacagtgtcccaggtgatccaacatcgaaaacagctgagatgatgcagcattgcacactacaaaaacaaggacctggccaggtttctgtgttctgtcatgatccccatggtatggacatcacccccaagcagcaggaagcagtttggaatgaacaacgaccaaatttccaaatattgtttataaatgtttgttttcacttaaatggggttggttataaatggtaatgatcacagtcaatctctttttaaaggaaaaaaaaggggaataggatatagaaatgaatactttgcattggtatagattttcatttattgatacaatgttaaggtcaagtttgtgatatgtatatgtctcctcttgtttaggtattgcgtttatacagatcttttaaaatgtaatacataattaaatacagattgtatatagccaggtataatagtcaaaacttacagttagattttctagaaatacagagatgtatttgagatggatagatattcttcaaacctttaaaagccctacagaatatatggcatttaaatggtttagggtttttcatggtaatggacacaactgctcctggtacaacaattacgtctgagaggaagatgggcatcgaagaaacttgttatagagtttgctttcaacatggcaagattagccatttgggcaagccaactgctcttgcttgactgtttgttactgtataaattggacatgcaggacccacaggaaagtgactgctgaacttacaaaacaagatggacagtcctaaaaggttcttgcttcatggaagagtctgccagacagtctacaggacacagagaaaaatgactgataaactggcaatacagataggacagtttcaaattttctgcttcatggagaagtctgccagacacaccgtggcctataggctgaagatggatgccccaacattacagaggaactttggtgactgtccagacagtgagatgtctctgccagttctagagtttatatattattttctgtggtttttgatggagttgaagacagatagttatggttatagttttctttagttattataatagataagctacatataagaccttagaaagatagtgtagatgatagaatattttctttaaatcttgctacatgttaatagactaaatatcctaactatagttcttacttgataactgttttgctatatattttactatgttaatgttaaaacctttctttttatttagacagaaaagaggagatgatggaggaagttcttcggtgtatatgtttgtctcattggttgataaataaagcactgttggccaatagggaagcaagttaggcgggacaaggagagaaggaggattctgggaaatgtagaaaagagaggagttgccatgtgatcccaggaaggccggagcataaggcctgcatcctcggtaagataagtccttataaaaatatatagattagtagttgtggttgataattaaggctgagttagcaaataagaaatcctagtcattggccagcagcactgtaactagtactaatctctgtgtgttatttgggggccgtaatgtggcagcaggaggctggcagaaagagttatggttccagcaagcctcgttatctgcacgcacagggtgggtgctggtagagaaaaagatgatgctggttgctgtgatggagaagggaccctaacaacaccagaggaccatttgcagtcccagccaggccctgtgtaatacaacagtccaggccaacaagactcacctcctgccccacaaaggattgaacttagagagttcagaagttgttgcttttggttgtaggacttctcagttatgtgccatttatgattactttagcttctctctttgtttaaagatttacttttgcgtcttcttcatgtatgtgtgtgggggcactgacagaggccagaaaagtgtgtcagatcccttggtgctggagttccaggtgcttgtgagctgcctgatgtgggctcattttccttaagggtaaatatggtctattaaatacaatgaagaatgaaagacccaagtcacaggtgtacaacatagcagaacttactagatgcaatgaaagcagcaacagaaaaacatattgccttgaattcttttatcattaaaaattaatgaaaataggggccacagggatggcttagaagtcatgagcactggcttttccagaggaccagagttttgttaccagaacccacattacagcttaactgtctgtagcttcagttcctgggaatctcactccctcttctgacctctacaagtattaggcatacaaatggtgtacagacacacatgcaggcaaaatgcttatacacatcagataaaataaaataaaataaaataaaaaaccctctacagaaagcactaatgaaaataagttgattgtatttcagttcaaaaactcagaaataagagttaaaagagccccaggaaaaacaggttgaggtaactaaaaaaggtaaaatcagaatttaatagattctttaacagtaaaacacagagtaattagtaggtagggctatgatctggggtttgataagttcccctatacttcctgcttaagtttatactgaaaatttcttcagggtctcaaggacagaaccaactacatgggatctcttatttattgtgcacctcccttatggtgttacgtctgaaatggttgctctttagatgtggtaagcatgccactctcctgggctacttgcctgtcttgctggaggagatcctccagtaattcctaatccaaagcaagagagacacttttagaaccatagcataactgaagatgacacacttgttgacagtcctgggtggtgagtatagcttcctttgggactttaaaagccattctctgaaggtggggtttaaatgagttcaccagatccaagataaatgacaaataggtgtttattagggaagcacttacacagataagagtaaataaccgccgaggtcttcctgttccagaagacatagtctctgccctaccgatgctctccataacccaagagagcatgagctagcccctcctctaccttataatgagtcatgtctgcacctgagaccacgcccaaagggtgtggccaccactacgagttcactggcaaggcgagatgccactgcaatcctctcctttgttttgtgtcatgggtgttactcctggggagctggatagtaatcttcattttttataggcatttttcttcaatgaaaatgtctagaacttttattaatccttgtagatctaaagattcgcgttaatattcctattaccattcatttcacacgaccgtccctttctcctccatttcatgttaacaatttctttctcaatctctgtgtccacaatagatgcatctatggaagtgtgtgtccttcagtgtgggaatagcccatttctgttcttcgagaccatacatgtagaagctgctagcagatttagatctgtttcctctgatgtcatatgtctttttgttttaaaaataattttagatgagttcactgagtttgcttttcaaatttgttttgtcctttccatttcacatggtatgtgcatgcatgtgtgtaggcttgtgtgtgcacaggtgtgctcatgtgtgtgtttattttccagaattccctcctgccactaattgggaagcagtgcattattttaggatcgtctcaaacatttaaatacgtcacatgggttttgttttatttgaattcttcattcattcctcagctgtctgctttctcttccttgtggtgtctttctctaagtcctccatggatgtctggttgttagtggcaccagacagtgggggtcctgactgccgtctctgggcatttgtagagggcgtggcacccatgaaactttcttttctggtcagcaccttgaagctctgcctccatgctgcccctcagtgccctggtgtgttattccagctgccacttctccttggtccattcacctactttatcgacacatccttgatgtataggactctgggatacaaaccctggtctggtgaggggaaatgggtgtggaccagtctccacggaaaagctctctgcattttcaggccttcccagccatccagttggtttctttctgggtcccaggcccctccgagtcctttggacttcccactgtgtgcaggcatccccaggccttcacccaagctgtcctttctcttttccaggcagggatgcagctgcccttaggtgcgcagtatactctgcttttctttcttcatgcttttctttgcattcttctgttgtgtttattaataatattgcattatttgctgtcatttcatgtgctttgtatacttctcatatgataaaaaccgtaggttttctaagttgatttttttgagttagcatacagagtgacggaatctctggtggtactttctgctttgttctgtttttctcttcccattccctctggctgcctctgctgtgtcctctggcaggtatatgctggggaagggccagtccagctggtctctttctggggctgagcaggatggtgagtgtcaacactcagacccccctcctagtcactggagagaaccacactgagtccagagacttgtcgaagcagagtctcgttttattgtaacaggcatgcacttatatagcattgagaatgtgggtggggacctcaggatggggtgaggtgtaagggccaataatatttcaccatgttagcagtagctgggcagaggcagttttgctgagtcactcctatgcggaagtgataggccaaagacaggtctccaaactctagccagactcaggaagttccactaggccttgcatccggccttcctctctcccagctgctccattgcctgcctctatttcacataaactccactgttctctagcttccgggacttcttaaattagcagagcatatactaacaagtacagccaccagtgcctcacacgtcaccttcaaggtctgaagtctggcccttggatgatgtggatagaagcatcttctaatgccccatctcactccctggcttggccagtgggcggggcttcttgttcctgtttccctcactgcacagctctcacttttacgtaccacccttgttttctgaagctgagctctgtgtttcgtgtgagttccatccaattcggaaccaatcctgtttcagtgagtcttttcctctcacaaccaccattggcagaagactggtgacacctgggggtgagtcagtcagatgtcctgctgctctagagccagctatgtaagttccagtcctggccttgccggctatgtgactgtgtagaatgaagatgataactgtgttttatgggttgtcgtctatggcgtctgtttgtataatgggggagagcactgtggtgtcccatgagtggccaacagtgacaccctgtatgacagcaggacacagcctgctggcagtgtgcaataaacagccccaggaaactctgaggcaaaggctcagctgagattagagcccagagctggtgccaaagctcacacttgcgacctcttgaccactccctgctctgcgccactatagcctgttcagagacttcacccttctgcctctgttatgataaatctttccgccaagatttatcaggagctgccatgctccactgccatgtgtgagctttacgccagccacccgcccaaggtagggcccaaattaatacacagaaacttgtattaggttcaaacccgcttggccaatgactaggatttctcatctgttagctcagtcttaattatcataaacctatatattttataagacttatagaggatgccttccgctggcaccctctctagccggtggctcacatggtgcggctggaggaggcgtaggggaaatatgagtctccttgctatgtcacttcctgcctggatcactacttctctactacatttcccagaatcccctttgactcctagtcctgtctaacttgctgtctcattggccaaacagagctttattcaacaatcaataagataaacatacacagaagtactttccccatcatgcctctgcctcttactctaaagtttttgtctttggcttcactggagcaagtgtagggggagtatgtcccctatgccaggccatccatgggctgttggctctcgtccttggtccctggagctagaggagctgagaattacccctgcagcagtggctatggccaggaaccatgcttggcaggcaccatcttgtccaacaggacattggagagcaaaagtggatctcacagctcaccctgggctttgaacaggcaagtgtgagatggaggaatgggtttcacttgtagaggatgctgggcaagcatctttagttgaagggaaactgaatttgggtggccattcatgtcaggtgtgctcacccattacagaagtacctccctttcctcaagggagggagcttcggtgggtgtcctgattagctaggcagggtttcagaaaggcagtaattgacaacccattttggttcatttcacctttccctgagttactgactcttgggatctggaagatctgccaggtctaagaagaggcaagtgtccctgtcatcttgtcatgtatgggattagccaccaaaaagggaaccagagaataaacatgtgcttttacccagcctcgtccaggagagagcaggtaggagtgggggcaaggagagacaagaggaggagacatagggagaagaaagagtcagagagacaaaggtgagaggagtgtgtgtgtgtgtgtgtgtgtgtgtgtgtgtgtatgtgtgtgtgagagagagagagagagagagagagagagaagaggagagagaaagagagagagagagagagacccagagagagagaccaagagagaccaagaggacacacaacacacacacacacacacacacacacacacacacacacacacacacacacacacacacagacctggtatttaccgttggctatcaacataacagttagtaaataactagctagaaaactgggttggtgctctgattcagctactctgtggccttgaactagtccctcatatttaaagtggtataatttaattcctgggaggatttcccacaaatcagtgataatctggcctggtgcggagtgtattgcttctaggcagtcctttacctggtcactctggcttttactttatgatctttaagcaactttctgacaggtcctttgcatccctgagtctgttgttcaggacacagcgctgtgaatgaccagtgtgaaattacctgtgagctggatctgccttggtaaatggacaaatcaatctacctatcagtgtttgggctggtaaatttggccacacgagtaactctcccaagtaagacccaggttccctctcttcctgggatgctaagatctgaggcccatggtggcatgaaatttctgccaggtgctgtttacccacaaaggccaacttgagcacctcagcctacctggctctttggagaggtgggaggtgatgtgggctgttgaaacagacaggcatgggggcagatgtccaagtttggcctcttataggcttacacccagtaggaggtaaagctggcctgagctaaggtgggtcaacagattcagaggatctgggaatgtgactccagagatgctccaggctggctgtcttgtttttcacctgtgaacccccagccctgttgatgtgctctgggtgtatagggaagtacctgggtcccatccaccaccctagtggacacaatgcagggtgggcctccccagtggctctattatagcttcctagtgctttgatgaaactcactacacaatagtagtctcaagtgtgcccaggcatggcttgtgcggggctatgcaccgggcatgtattcatcaactttaatagaccccggtgtttgaaacaatgccttaatttatttatttatttattttttattttttagcgcctgcacagaagtgtggcattgtatggcaaatggaagtgttactacaatgcctgtgaatcagagccctaaactacgtttcaattaccctcctattatccagctggtatttaagcgtgtttattattcaaatcagcggcgagtgtgcggctgttgtgtaaacaagtgtcaattgctgaaacaatgattaggaggcactgtccctttcaggtacacttagtggtgcttacaccccagccacttgcatttaaatatcatgtaaacacaatgcctgagtgactactttcactcctgttcccggagccgcatgccaattctattacattaagagggaaatctattaaatttttcatttatacacatccgaacactgctcttacccattgtgtcattaaggctcagattaatagaatagatatgctgagagatacagtgtgcgttgaaaaagcctgttcagaaataaaagccaatttctcaccattatttgggggtgttggaaagctttcatgcaaacaatgcaaagaaaattattttctgaataaaaagcatgacacggagaaaagaaaaagttggcccccagaaagaacaatcttgaacccttattagctccattactgattcagggcaggaaaaaagggtaggggcgggtgatggaaaataggacatttgtaaaatgactgtgtttttttttttttttttgagggttctttgctgtcctcaggaagatatgtgaatgcgtgtggatgtatgtgggtgtgtgtacacccgtgagtatatatgtctgtgtttgtatgcaagtgggaacctaaatgtgtgtgcttatttgtgtatgtgagtgtgtgtgtgtatatgtgtgtgtacattcattcatgcatgcatgtgtgtgcttgtgtgtgtatgagtgtgtgtatgtatatatgtgattgtgtctacatacatgcatgtgtgtgctggtgtgtgtgtgattgtgtgtatatatgtgattgtgtgtacatgcgtgtgtgtgtgtgtgtgtgtgtgtgtgtgtgtgtgtgtgtgtgtacttctgttggacatggtttgagttgctaggtagagtttgggcttatcccttgactctgctcccagtgagtaggttttggctctttcattaagatcgtttctcacatgtaaaaagcaagtccattttccagtcctccaggctgtgtgaaggtgaggaattgtgatcccaccagggatttgtgcattttctcaggtatgttttcagggatcagtaatcttgttttcaattaatctcagctgttaacttacaaataatatctactgtgtctatttttgtctggtgacaaaggctgtgagtgcctgagagagggaaatagccataggctttggtttgagactgaaaacataggcttagccatctggggattcagccaatggtggatgccaactagtttccaaagttgtgaggaactcaacttgaagtctttcctcctttcatcattcctggaacaacacagcacaaatttaccttgtgtcatacataaatgacccagagatgacttaaaatgtaggaacaggttacaagaatgtgcttgggagatgtggaaaccccatgccttcttaagtggccctgaattttggaatcttcagggaatcctggaacctgtcccctaagatacccagcagatagggacaactaaagactgtactcagtcatgcctcccaagagagcatcagagacctgtgatctcatgctgggcatacaaaactctgcctccgaatgatttcaaaatataacacatacctggttgtgtaagttatcctctcctcagggttactatataatttatgatacacattggggacatattgagagggatgtgtatttaagaatcattccacaggactagcaagatggcacagcagggggaaagtacctgatgacttgagctcggtccccagaacccttatggcggaaggagagaaatgactcccacaagctgtcctctggcttcaacagatgctgtgtcttaggcatgtccctgctcttccctggcgagcgtgtacatcagatcacactttaatcaggggacatggctaaagactgaatctagcgaaggcccaaagcagcaaaagacagaaagcagtgacctgtggtctccctatacctttctctggaagttgctcactgttccatctttagagaaagataattgatcttttttttctcatcctatttgtgaaagcagaacccccaaaggcaagtgaagcaaactcaatagtcagaaaacacagtaggtggagatcaaactttacatattagataaataatgaggggttcacttttcaaaataattaccctgtaatgaaaagtttggccagattcctagccagaagcctgcatatgtggattcattcattgatgccttactagggatatttgttcttcaactctgaagtctgcacatttcatacaactctagtttctaagcagagacccaggtcctcagcagagtcaaatactggtatttggtagctacctttatcactgcaacccagtaggtgctagatctcaggttttaaatgataagcagtaggggctggagagatggctcagcaggtaagagcgatgcttgagcataaagatgaagacctcagttcaactccccagcacccacataaaagttggagggtgtgcctgtaaccccagggctgtcatagacagagataagaggatgagtggggcttgagagatgccagcctagctccaggttcagtgagagaccctgtctcagggaatagggtggagggtcatagacaacctcttttgaccttcatatgtacctgcatgtacccactgtatgccacacacacactgcatgcacacacacaaaaataaataacagtctagtgaactgtagagtggtctgacctgcaggagatgttacccaggcattgcaaacttttatgctagcacatgaaaactgtttctgtgttttatataagcagcatctatactgacatcccagggtccctgggatgtcattttcagcttgtttgtgactgtagatgcctttctttcattgaatgtattaggtttgttggtttatgtgcacatcaacaataggctgcaggtgtctggtctcattcctatctgggcagagttatcccattgccttgaatcttggattgtctgtcactaggttctctttgggttcctgtttataatggagcaggatttatgcactgactggcattcgaacactctcattccaagtggtcacagtactggcttttcattctcaggctttcgtctccttatccttacatgctccctgcttctgtctgtaaacctatcaactcccagtattttcctctggtgatgcctagcgccggtcaccagatcccaaattcttacagctcagccttctgtagccccagttgcctgactgcttttacctaaaaactagatgcaccttgatctttgtcacatgagctcatttggtggcagtaagtggcctggggtacgatttgttattgatggaaaatctatagagtttctgtagcctcctgttccccctctgttgtctgatgctgtgagactccaggctgcttcgccggctgatatttgttctctgtggttgggctaaatggtctgtcctggttagtttttgtcaaatagacacaagctagagccatttgagaacagggaaccttacctgagaaaatgtctactagattggcctatgagcaagcctggggacattttcagggttagtggctgatgtggggggacccaccttacagtgggcagtgccattcctaggcagtggtcctaagaatgcaggctgagcaagccatggcaaacaagccagtaagctatgtggcttcatggcctctgcttcgattcctgcctccaggttcctgccttgtttgagtttttgctatggcttccttcagtgatggaccaggaagtgtaagacggagcaaacattttcctcccagagttgcttttggtcattttttttttcattatggcaatagaaaccgttactaagatgtgacccctcaaagtcccacatgagaaggcttggttttcatcctctagtgagacttagtaggagggagttaggccactggggacaggccctgagcacatggggagacctgcttactctctttcttgtcttgcctgctacgtttgctgctatgagcttctgcctctagggccaaaagcaatgggcaacctcaacaatggactcaaacctcgagaatggagccaagatgaaccttccttcttttaaagttgatgccagtgggttttccaggtattttgttgtagcaaggggatcatcgttaacttcagtactatctgggaagcaactggggagacttctagcacagaatgggattatatcactccttagaatctcctagaagcagccgggcattggtggtgcacgcctttaatcccaacactggggaggcagaggcaggtggatctctgtgagttcgagaccagcctggtctacaagagctagttccaggacagcctccaaagccacagagaaaccctgtctcaaaaaaccaaaaaaaaaaaaaaaaagaaaaagaaaaaagaatctcctagaagcttcgttcttggaacaaagaccaaaagtctctgtgataccccaccaggctcctgttctccgtgtgtctcctactatcctttctgagaccacacaagcacctttgatttctcttaaacaatagagatgctgtcctgcctccgggcccttgcacgtgcctccacccatgctgggttatttctggctcacatctcactttaattagatctttgttcaagtgttcccttcttgagaaactgtccgttgcaaggacactgttattccccacactcctgagtcgccctccctggctttatcctcctccgtggtgtacgtggtcatctctgataccctcctccatgtacgtggtcatctctgatatcatcctccgtgtatgtggtcatctctgatgtcatcctccgtgtacgtggtcatctctgatgtcatcctccgtgtacgtggtcatctctgatatcatcctccgtgtatgtggtcatctctgatgtcatcccccgtgtatgtggtcatctctgataccctcctccatgtacatggtcatctctgataccctcctccatgtacgtgatcatctctgataccctcctccgtgtatgtggtcatctctgatgtcctcctccgtgtacgtggtcatctctgataccctcctccgtgtatgttgtcatctctgatgtcatcctccgtgtatgtggtcatctctgataccctcctccgtgtatgtggtcatctctgatgtcatcctccgtgtatgtggtcatctctgataccctcttccatgtacgtggtcatctctgataccctcctccgtgtatgtgtcatctctgaatgtactcccctactaacctgcatttgtttcagtctccctactcacacgagctccattcacaaaggcggagaactctgcccaggcgttcctcatgtagcccgtgtgatagagacatctaatcaatgagccagatgggcagatgaaaccttggtcgatgatagtgaaagctagttttcaacattaccttgatgtcgtttgcactcttagctgtttgtgtctggggacctcacactacagataaaataagacactgccttcatttcttattgatatttaaggagttggtcctgagactccagtttagactttctctgttcttatgcatctagtagaaagtcatggtttgtaaagcatctttcaacttccgcaaagaagaaagaggaacgtcggtactgattttcacaaaggagaaatctgttggtaacttggaacagtggctccttcgtgtatggagccaaatgaagtaaccatgcttaccccacccaattcacatgcctcctggaccaggaagactcacttaacttcagcggctgtaagcacagtcatgaaacgccccagtctcccacttaagaagcagttaacagccaacttattagccattagcaactgcctgagtctgttagttcacatttcagtggtgcagacggctggagttcagactggtttggtgttggctggcttcagctttgtgatcccttgattggacacattatctaagtgggggagacacattgccttacactgcatttactctgtgaggcacacctgtctttcatttcccctggggtggaattttatggttgccatttgcaaaggaataatctatagacactcaatgtccatgacctgaccttgagcaaacatccagaaaaccagagtgatactgctgaagtcaacggtggattgatatgcttatacctgaggcaggcttttgaccgtctgtccctttttggcagatttggtgatggctctgcacctgctatcttgcttcttcgtcttgaatttggcttgctgatgtcctcccaaactgtacgtgtgttagtcctctgccacctcagggtcttcctcagtcattagcttcttggctcttttaatgcattataggtttgggagagtttaatgagggcttagggacattttccagtggcgtacatttcctttactgtggcaagtatctaggatcaatgggaaaactttgtctcagctgcctgttttagggttttatctgggggtcagctcattctgctagtttgggattcctgtcagcatagtgcatcccagtaagagtgcatagtagagaacttcttactgcaagactgtagcatgagttcttttttgtttgtttgtttgtttgtttgtttgtttttgtttgtttgttttctaagacagggtttctctgtgtagcattggagtctatcctggcactcgctctgtagaccaggctggcctcaaactcacagagatcctcctgcctctgcctcccgagtgctgggattaaaggcgtgtgtcaccacacccggccgactgtagcatgagttctaataggtctcagtaataaaaaaccagagtcaggttaaagctgaagatcagaaaagccactagagttctcacctctaccaatgctcagactgaaggggtggatgatcctttgaacctcagactgcccctgactgcactgctgctcagactgctcttctcttccccaaatctcaggctgcactgagctcctgtctcctcacaccttatattcctctctagggctgggattaaagtgctgggatcacctttgcgtgagctctgtttctcttttagattggatcaattttgtgttgctcagggtggctttgaactaacagagatccgtctgcctcagttttcctgagtgttgggattaaaggtgtgtgctaccactgcctggcttatatggctgtggctagctttgcactctgatggtttggcaaggtttattagatcataaatgacacgtcaccacacaagactgttgggaagggggtggggcaaaaggaaagagctcaatatgctcctcaagctttgtcctgtagacacactctctcagccaggccctgcctcctttagtttctaccaccttctaagaacaaaggcagttggggaccaaggctgcatccggcacctaaccttgggagccatttataatagaaaccgtcatacccagttcgtgatgtctcagaattcttatactcagttccaatttaaatcaaacttttagccgttgtttagttagtaaatccacagaaggcatgcagtcttgtaaacagtctttgacatgctatgaagttatcagttgggcacaagtactggacacaacatacatgaattctaaattttataaaacctgcaactctcagaatttacccccaagaccttgtatggagaaggacactctgaagaggtagttagatcttgagctgaggtctctctgtgttagctattccaatgacagttgtcctcacatgacacaggtgaagcaaacccagggatggagatttgttgtcttcacataaacccacaagcaaagcaaacccggggtggagactcacatcagactgaggaagctggaagccgaggaatgcctggttggccagacaatggttgaggcaaggccagaactttccttagagcccaagggcctggaatgttggggtgaagtgggtgtggtctcctcccactttgtgaatttactgtcagtacacagaggcagaggtgggaggagcctgagtgtggtgtcagcctcagctacagagtaagaccccgaaaaagaagttagggttggttaaattcaccagggacagcaccgagaaagatgagaggagaaagctagacctcgtgccagcccagctgtgaaagcaaagggaaaagtccagaaggaaatggatagtcctgctccagtgaacacgtggactgcaacagggcacacaggcttgtttctgataggggaaagtgtgagagggtacattctacacttttgcagccacatgaactcacagggccaggagttatttaggaagagatgctggaggcgaatcctgaataagacccacacgtgtatctgtcactgaggaaaaggagagccggaacatcctggctgacccatccgttctataagattgtaattaccgtctccagcaagcactttctgaaaagtctgtttgagaacccagttctctgcaggcagacctgggatccaggtaaaatcacctataaagtgtgttcgtggagctgggggataggccagtaaactccttgctatgcaagcatgaggatatagtttgaaccccatgggtaaaaatgctgggtgtggtagctggtacttgaaatcgcagcatgggggaattggagataggcagatctctgggtcctgctgctggccagccagcctagcttcatcggcaagttctaggccaagtaagaggtcttgtaccaataatcgaagtggatggcacctggggaatgacatctgagaccgacctctgaccccaatgcacacacacctacgtacacactcatatccacctacacgcgcatcacacacactcacacacacacacactcacacatacacacacacatactcacacacacatacacactcacacacactcacacacacactcacacacacatactctcacacacatacacatacacacacatacacactcacacacactcacacacacactcactctctctcacacacacacactcacacacacatacacacacacactcacacatacacatacacactcacacacacactcacacacacatacacatacacactcacacacactcacacacacacacactcacacacatacacacatactcacacacacatacacatacacacacatacacactcacacacacactcacacacacacacacacacacacacacacacacacacacacacacacacgctgtatgcacatgccatagtgagttcttgggggctggggttgtccgagtaagagacagagtgcttgcctcacatacataaactccaggtttcatccccagcactgcagaaaacaacagaccggcaacaatgacaagtagcacaaaacaccagaacaaatgactgttcttccactctggaacttaacagaaaccctttgactattgttctgcagtcaacaggactcatctaattggtgaccatggcaacaaaatcaggtcacatggaggtttgtgctgggatcaagcatatgcagatctcctagttcaaatatacacagagataagagcctttgggtgagggcctgtaatggagggttgaagatgggctcacctacactgggcacacaacactgagaaaaatgattgcttgtttgtggctgccatacatttgcagagaagggagaagctttgcaaactcacagggtgtgggggagataattcagaagtatgaggctggaatggctgcgtctatgctgcctcccagatctgtgtaatttactccccggggtttgtagtgtgtctgacttatattttagacataattaggtaatcagcagtgtacattgtaaaatgaacgtttaggctgcttgaggttaaattttcacagccatagcagctgcgtggtactagccaccaccccctccccacagccaaattctctccccggcatacagtcagcgatttaaaatctgtgaatgggactggaaggattcgcagtcctcatttttcagcagctctaaacagcagccacacggtaaccactgggtaccaggatgggatggtggcagttcacgctagggagtgttcgtctgccctggctcaggagccaagcagcaaggatagcatcaattataatctgatttagacttttatttatgtgggttctccttctggccttttgaaaccccacgagcagaaatattttctccgtgacacagatggaaacaccaacatggtggcagcagaaggttctgcaagttcctgtggtttctgcctttcacatgaagaattaaggatgaggtccctatttggaacgggtgaaagaggtggtgcctgagagcttgtccatgggagttttgtcactgtggcttcagatagcccgtgagagtgtgcaccctgcccctggactcctcatctttctcctttccagtgagctcctctttcagggacacagggaaaggtaggaactcagaccttttatctgtcctttcttgctttcctgttattttgtttcctgttgctgtgactaacacagcaacctcaagaaggaagagtttattttggctcatggtttgaggggctacagtctaccatggtgataggagtgagtgtgaagcctgctcatcacatttcacccgtagtccaaaagcagagatggacaggaagtaggcctacgctatgaatcctcaagacccatctccagtgacttaccttgagggaggcaccaccttctacatgttccacacccttcccaaacagcgccaccagctggagacaggtgttcaaacacacgagtctgtggggggacatttatcatttaaacaccaggcttcctcccctcctattaaactcaactcacattcaatttcttcttcactttccccaccaaacctaagagaagaccagaagagatggggacagagcagaggcgaaggacaaggtctggtgtattctgctggaggggcaaacgacagcccatgctggattgatggggactttctaagaaacctgtcattcagcctcacagatttactctttgagccacgtctttgtcatcctcatcctttttcttcctgaaaaagcctggtgttagctaagttcaactcttttctcttcttgtgcttcacccagtcaggagaatctgactggaaagcaagatcgctatagtggtggacagaccaccttgttctcaggagtgaccctctggtggccccttgcagctctgcaggcctgctacttagtgtccactgtcccaccgagcactcattcttactcctagtgggcaagatcatgtggactgaatccacccatcttccaacacctctttgggctctggcggtgaactgtctgcgcccagcagacagagccgtcaggccatctcacctgttcaccagcctgtgttttgagggaaagttgagcccccctctttctcctgctttttctcctctttaatggactggttttttggtttttttttgtttgtttgtttgtttttttttttttgccagcaatcaaacacatcataacctctccaacactccatgcctcttccctgccctgcctctctcacttaagaggaccccactgtttctctcttactagagtctggccgcactccttactgaagccaatcactcactaatttttcctgtcctcctgtctgttgaatccactatatttggagtttccccatcattattccaaagaaaatgataaaaactaaccaaaccacccaaccaaccaagccaacaaataaccaaaccacccaaccaaccaagccaacaaataaccaaaccaaccaaccaaccaaccaaccagccaaccaaccccaaccaagcaaatcaaacaaccaactaaccaaccaatgcaacccaaccagccaaatcaacctaccaacaaccaaaccaatcaaataaatcaaccaaccaaccaaaccaattaaccaaccaacccaacccaaccaaccaaatcagccaaacagacaaccaaaccaactaaccaaacaaacaaaccaactaaccagccaaaaacaatcaaccaaccaaaccaaacaaccaaacaaattaactaagccaaccaaacatctagccccacatcagcttccgtcggttgtcacttcctttatttccactgtaacttgaggtgtcttctccctgctctacaaccacacttctgctctcttcaggctttgttctgacttctaagtgtggagagaacgagggcttgcttagaggacatcacctacccctaagtctcttggctttatacccacctctctatgcccagctggtccttccccatgaactctagactttacatacagctgcctacttgagtctccagatggagggctaattgcacctaatgccagagctcctcgccctgtaactgctcagtctgcttcacagtagcctgtccttcagatttcaaaagcatgcttagcagctctgcattagtctgcaaggttctgcgacccacacctcccctacctgacagataaagagaggacatgagtgagctcagggggagagtcttgaatgtcacatgggctatagttctgttggacgctcagctgtggatctgttgagtcccactcagacaccaggtctagggccagagctggctgttccactggaggaatggaatgccttcatgatggatctgaacaggctggggctctgcttcgtgggtaatggcaaggagcagagaaggatgtaaaaggttctatctgggtctgccagcatgcttaggcaaagcaggcactcagtcattggctgttgggatccacagcatagtacagctatgtggggcattcctggaagccatcttcctgttgtggacagaggagccagtcctcaaaggtctttgtggaccccattctgacataatgaggcccttgctcagaattatcttctcccctgggggtgacttttagtcacattttttggttttacaaatcaataattgtttagggaccagattcctgctgtgacttggacttgtcttggggactttacacaagtctcatctgcttgggatatgcactgcattagctaggagatgctgagggttttccaaggcaatcctgatatagtacattcagcagctctgggattgtgagttgttttcatgacgatttcacagatgaggaaactgagcttacatgttttgttcaggtccacccagatccttagtggagttgccaggttctgaacatcgtatcttgccccaggaactattttccagctagggttgtgtttgtgtttagctatccatggatctctggcatgagagccacactgcacacatagtacatgttttgtgagttgaatggattagtttctaggaggtcagtactcccctggctctcctgtgacccgaaaagcttggtcttgggagtttcatcccatgtactctcccaagtaagtgttgttatttgaacatgaaatgtcccctcttgtctttgcatcttggtgtctggctggcagtgatgtttgaaggttgtggaacctttagaaggtggagccttgatggaggaggtgggctgctgggagtggcctccaggtttcatactcaggccccactttctgttcgctctctgcttcctgagtgtgacagtgaccagcctgtctcctgctcctgtcaccattctttttctgcttactgttctccccataaggatggactctttccctgtcaggcagtaaacccaaaccctttctccctcaagttgttgttgtcagggcattttgtcaccatggcctaaataccaatgaaagttgtgagctccggtgagcagctcctgcaaggatttcctcacttcctcccggtttcctgagtcctagcctccacccttttctccacctcccccaccttaggaatcacatgggactttgcctgtgagtttttttctaacatttgtggctctttattacctttgacacctgccttcttcagtcctccatgtagttcctcgaaggagacccttaggagactttggtacgttccgattatctgtccgctttcagctgtagagttaggatcttctccctataaaaggcattggcttctaagatctgtcataagcagatcatagactcctcgagtctaatgggcctccatgaattctgcaaacccagcagtgtcagggtactgcccaaataagttgttcatggccacttaggttttcctgtgtgaacaaagccctcaaggtcaataggccattacagcgtgtggcccctcactgggacatgtgtaggtcctgctctgaagagtgttattgccagagcaggcctgactgatgaagtcagtgcctaagcactggccacgggtgaagggcaaagctccagtggtcgcagctctccagagctgttatttaggcctttgctaggagcccagcagggctggcctgtttatggtgacttgagctcctctttgcttctggaccaagaagctgaagatcaggtgttactgcccctttcagcaccaacaatggcactttgcagacactgcagaataacgggcagtagtgtttagggctgggtacctggaggccgagcatctatgggatgctttaccctgcggatttttatctttctgagcagttgttgtggaggggttagaatgagagggtagagaggtcctggtgggctgaggcaggtgatcgtcctgggaagaggagctatagagagcagacaacacagggcgggcgctcttgagagtctcagttcctcactccctatagagggcagacaccaagggggggcgctcttgagagtcccagttccccactccttatagagggcagacaccaaggggggtgctcttgagagtcccagttccccactccctgttcttttctcctcctttcctctaccttctgacctgggggtgattctggtaattcagctcccaaggtggattcctgggctgatgtctgccttagcattggtttcttgtggaataaagaatgaaaggaaagagcggggggggggggctggtgagcaccatctgtgtaggtcagtggggcactcccagggctactaagttaccaagtctcatttcctttggggaataagccaaggacacaggcatggctacctccatttgggtctaggtaagttcggtgacttgatgaaggtcagtttgtctgtatgttggactgagccctaaaaccagacctgtctgactctggagctgagctattggtggctctccaggatgggtggacacaaggagtagaagcctcctggtaacttggacatgttaccaggggtcagcacagactggctttctcttggcctctctcctctggcttgcacgtagggcttatgtctctgtgaattgtacctgtgccacagccttccagctgagccccctttcctgagtgctgcatactggtgtggaagacaaagccacagaacgactccagtcggggggcacacatgagcatgggtctcattgatcagacctctctgggaacttccgctgcacaagggactccaccgggggcggggccctgagtgcatcctccttgtgcccggcgagggtccacttctcttggcaatgaagagtcaacaggtgtgaagaagtacacggagacctggcttgccagggctggcaccgctcgaggccttcactcacaagagatagcaattgccaccttctgcaggctgcccatcaaaacacattgttgcctggcaccttcacaggctcccaccaacttgtgagcaggcagcgtgccatcacagcagatgggcgaaggggtatggagtggacgaagcagacctgtcttggaggtggtgcatacacaggagagcgtgagggtttggtttccagctacggggtgccagcagaactcttttcaccttggatttaggggacagaagttaaaggggaaggagtccacccttgagcttgtagcagactagctgacggttaggttagttcttggcatgggggaggggcgtgtagtcccatgaagcccatcagaattgtgcggctctgatggattttataggcacttaggaagttagaggacatcctggtgattgtaggagctaaaggacaagagaaggccatagagagacttttgcctacagtgacccctctgccattcccaccacaagctatcttgactacagactaacagagtcctactgctaccatgctactctatgaaggtaggaaacacagcaggagaagcctccccatgggtggtggaagcagaaccattaggggatggaggaacagcattcctgctgcccaatcactcacatgtgaacatcttgaaggagccactcattgctggccagcgaatctatggatgtggctgtcaagaggggagaggctctgaggggtgagagtcccaggaagggtgtgtaggccatttgggaagagcaaaggccaatggagagcagaggaggaaagtgaagtctgtgctggggctgcagttcagtgtagagggcgtgcttggccagcgtcggtgaaaccatgggttcaactccctgagaaaccaaccaatcaagcaaaaaggaactttggaaatggggagaagactcggtgggtaaaacatctgctgtgagggtctgtgttcaaatccccagagtccatgtaaaatgagacacggtcatgcacgtctccaatcccaggactcctgggtgagttgggaagcaggagacaggagaattcccagaagcccatggacagttggcatggtgtatacagcagtgaacaagaaagagagcttgcctctaacaaggtggaaagtgagggccaaacactgggttgtctttgccttccacacatgtactgtggcatgcacatggacacacacacacacacacacacacacacacacacaccactcatatgcagagacacacacacacacatacacacactcacacacatacatacacacacaaacacacactcacatacacacacacataccccacacacatataaacagacagacacacacacacactactcacacagacacactcacacacacatacacacacatacacacacacatacacacacacatacacacacacatacacacacacacaccactcacacacatacacacaagatggggagaggagagaaggacacagagtgaaagagacagaggttgcttttgaaggtgagtggtgctgtgtgattttcaggaccctgaatgacccggacaggctcaggctccctgcataagcagaggaaccttggaaggcttatgctgtgatcagggttccttgagaaattgggaaattcagaaagacctacagttgggaagccaggtactggtgctgccatgatggcctgtgtctcagtgagcacaggggaagtgagccgggaagtcagggacagtgggaagtcctttactggagtgtacaagaaagaaatgaggacctggagggcgagaagacagagcaaccgacagaatggccgtgctgttcacagagaaaggggagtcaggaagcccctgctggacagtccccatggcagtcaactccatgcgtattactccatggtctttgctaacgctcacatgcgaccactcctttccctctagaatatagacggccatgagttccccggtcacttattatttcacaaggaaaccagagttcctgtaaatgagagcacacaagtctctgggcccagcttggaaacagttttatttttgcccgaggttcagtcttcatcttcacacaaggatttttggaatcaccccacctccttaacagccagcctcttgttgccctggacctattcttcccacttccacacattgctctcatctttgggttatcatgttgaataatttacagtctctgccagtatgaaattacatgtggggttgctctgtttgtggcttatccagcaattaggcacacacgacttcatcactgcaattacactgcaacgggggaaaacagctcagctgttgtgggggggggggaggcaaagaatggtgaaatctcaaaaccatgcatctgccagggttttgatcaagggtggacccagaatgacatgggaggtcttaggcaggcagactcctctttctcacgacttccctacacaatcttccatctgttctttgaagatgatccatcccaggattggaaaacagccttcagttcctgctctatgtctggaaaccctgctgtggcagcctggtttttcatactcagtgaaaaacagtgctgtgatcaattagtgattagtgatgtctgccacaggtagaggctgtgaaggtagggatggaggctgtctttgtatctgacatctctcattaattctaacttagccaatggagatgcaaaggcatagtgacttgttcaagactgggagctgtgaggccccattgggaggtctttaaacatttcattcacagtcttaattttacaaaggaagacataggagacctccatgaagacagcaggtagaggggtgaatgttcaagtagacttggggaaccctttgcgtttctgtctgtccagatggcacagccccttaacagtggggcttggaggctcggtctcctggttcccaacccacaggtggcctctccctcctcttctctcccctccttctatatctctatttctctctctctctctctctctctctctctctctctctctctctctctctctctctccccctctctctctctctgagatatatcaatttacagggtctggagaggtgactcagttgataaaatgcttgccattccagcatgaagacctgagtttgatctccaacacccatataaaaaccagagatgatctgcagcacccatgtataagtgagctccaggtttagtgagagatcctacatcaaaaaatagagagtggctaaggaggacactctgcacacctgaacacacacacacacacacacacacacacacacacacacacacacacacacacacagcatgcttctcagctttcatgattttatacctcaaattcagaaggaaatgaaggccagggttaagagaacaacaatgttgaatattcagggtgtggtaggcacagtgacagcagaattcaaagtcagtgtgcccagtcactgtccgaagtctcacacttcatgcaaagggtgagttaattggaagccctgcctccttcctagggcctctgcctgctgcaaacccttaactcagtaagatctatgctcttgagccccatggctagcatcctcctgcactctcagtgtcatggtccactgtcacatctaatcccgtggtcaagttcacactgagggcacagcactaagcagcaccccacatccccctgacctgacagccctgcatggcttcccctcaaagggatttgtgcattttgctttcaaaagctgatcggcttaggtcggcaggctccatctggaggcttatttcattaattcgtctttagacactggtcctgtggctttgggatcaggttctacattctcatctcttgtcaggaagtatctaaagtgacagtgtagagtgtggtgacacaaggaaccagaaagtcttgactgagatgaagaaaagggagctagtattcttagtcccaggagtgcggtggtgctgggctggcgtggggagggcggggctgtgcttcctagcagccagaggaagatggcaagcagagtgataggaaacacggctgatattcaggggcgtcacctaacgcaagtctgtctcccttcttgtttggaagtcttccgcttacgcctctgccttatccactgatgcactgagttccacaacagaaaggacactgtcatttccaccagtcacccaaatgcctggatatctctgggctctcagaaaacacattacttaacaccgactttaagctgagaatttctcccttaggcttttcttctttaaagggattaccctatccacttggttcatttactcagtttcacatagcacaagcagacttaaagggagggaacacctttgtcattcaccatcaccccgaccttggtgggcttggtctgaactgcatgcatgctagattctctgtcatgagggatggcttgcataatgggaggggcctacatctgaggggtggaactctggctacagccctactctttgcatacgtgcagtacgacaagggcagactctctgaaacacagcttatttgctggcacatgctggatgtgctgtgaagagtcgttgacatggccatgtagagtggccagcaccaagacccttaaaaccagtaccagtttccttcaccagttaggagcatgaactggagtttcaagttggctacttgccgtaccataaagccttgtgggagagtggtagttacagaggttctaggtcaacagtgatgcacatttgtgtgcggactggctacagtgtttcaggcagttggatctgtagtgcacagaggttactacagctttcctggttcagggcattcttggggtgttcagatcactgctgctctgaaagttaggatgcagtgttttttgccagtgtgtcagctcctggaaactcagctaccatgtatcctccctgttttaagaatttaggtaagaggcaggatacagttgaaagactgctgagactggtcctcctggagtctcatgtgaaacacttgcatcaaagggcattgaactcccagaagcccttcctggcaggtgtagtacacttagtgcggaagggcagctcttaagcaggcctctcaggagtgaattcattcctttgtggagcccttgtctccagcagcaggggtctgatgaccattgtgtgagaatgagctaaacaggcaaaaggggaaggcagccccctcacaagcttgcagagtggagtcctgggctccacatggccttcagccatgctggcttgaggacttgttatgattcttctgttctagaacacactcttgtgtgctttgtatgggaaagctgtctcttattgggcaacgatcacagaccctgcactgtgtgaaatgttgtaccagcttgaggagagcaagagaagacatcactgactgcccatccctccctactaagcaaggagagctagcatatctttagctaccaactgtgtcgtattagtgaagaactgcttggggaaaggtagagtgtagggaggagagaataatttcacagaggcaagaggactgaaaacaacctttctgggaagaatcgggtttatgttgtttaagtgagtaattacctacctgattggtagtgctgaggattgaagccagggtgctgcaaacactaggcaggccgctctatcactaaggtctaaatggctccaggacgctctggatctttctagattgctctgagacagggcatttgcttggacagagtatgctgggaagagtgaggccacgtgatgctggagtgagagtaagaagataccagtccacacctcctgtgactttactctgcacgtgaggtcctgttctggattcctcctgtttgggagtgtagggagaaatcctgattagaggtaccactgaccacgcttggtcacagatcacccaagggggcgtggtcagagttacataataagggtttaagaaggagggaggcttgcacgaggctctcttttgcctggctgggctgactggaaagcatttctgggtctgtcctgctcaggtgcaaacctggttactggctcccttgtgtgagtacttttccccaataaactaccagttatcaacctatttctgactccactttgtaaacatctataagggagctcaagttatcctgggagagacagatgtaaaagaagcaagttcaccagggtttgtaggttttggtacggttctgggaagagaagaagtggggtaatgtacagagaagcatgggtgcctgggtgaaagcaaatatcaactatcttacctgtgccataggtctctctctgtctccttctctctttgtctccttctctctgtctctctctctgtctctctctttcttctctccctctctctctcctctctctgtcttctctctctgtctctctgtctcctctctctctctctctcctctctctgtctcctctctgctctctgtctctgtctccttctctctctccctctgtctctccctgtctctctgtctccttctcttctctgtctctgtctctcgctgtctctctgtctctctctctctctctctctctctgtctgtctctgtctctctctgtgtgtgttcagggctgtgtatgtatttgtggggtgtatacacacacatgtacacacacatgtggaaaacagagttgggcgtcgggtgtcattcttgtcattctctatcactccccactttatttttgaacccgtgcctcaccaccaatttggcaagctgttcagtgaggtccagagagcatcctgtctctgctccccagtgctagcatcattagggtgcatcacggtacctggtttggtccttgtacatggcaaatgctttatctctggtccatctccccagatcacatcacaagtctttggtcaccacggggcaatcatcaatgtcactgctgtacaggcgaagttactcagaaagtgctctgtggcccctgggtgcggtgctgagtaactggagatgggaaacaaaggaccagcttacccatcagcctcctctttgggctcatagctttggggaaagcaggcctgtttctctttgctccttccttgagggagctgctgttggaaatctcatctcagtcctagaaatccatccagcttcccagtgatgggctgcctcccccgaagccagggaccagcatttcccacatcgagcccagagaaaactcatttcaaaaacacacggcgacattgtaaacagtggaataagttggcctggtttccttgcagagacaccggtgcattctgaaacggtggaggctccctgtcaattagagaaattagcgtctcactctgtggttggtgctattgctgctccccatttgcctgacccgaatcacagcagtttcttttttgtgagctgttccagttggagagtgagtaggatttgggggggtcttctttctaggaggccgactccagattggacccctcgttctgcctgtggtgtccccactgagtgagataagaagcagatgcgtgcagggacaggttgcagcagcacactttggagcaggtgaagatagagacggtagagcatgaattaagcattgttcctgcataacactcgtggccatctgtagtgaaggaagggaagggatgctaccatcaatttgatggctttaatcccacagggcaaaaacgattggatccatgaccagtaagatgtctcagtgggtaaaggagtttgccatcacgtctggcagccttagcttgattcctggaactcatgtaaaggtggaaggagataaccaactccacaaaatcatcctctgacctccacatgcacagtgagggacatgtgacctctcacccccaacgccgagtggtagaaactggttggagaaagtgcagggcagaaggtgagaatggtgggggtggggaggacgcgtgcatagtggaccagcaatgtgggccagggctctgtgaggtgagttagctgacatccgggtactggaacatgtgctgtatccatcctgtcagctgcacagggcacaggggtccctatgggagagcaaagctttgtagatgttctgagcctaaagcaagtggtgttcttgagacagcttgctcagccttcagcttgggcatgccaccgtcttctgtcctgtccactcctctgcttcacagtcagaaagaagtaatttcatgtaattgcaggagttggaagaatgatttttgatgaaagtcccaggtcatagtagtgaagctctggtccacagactgctgacccagcacagtcaccggcccatgatggctttggtgaactcttattctaccttttaccctttcttaccacagtgttctaagtgaggggagagccatttccaaacctggaccaatccctcttatttgatctcatcggtcacaccgggtctataggcggctgcattccattcctgctggggagaacaaggaactgtagagccattgtcccatcttctgatgagtgtggagagcagggacaatgtggtaaggtctctaactctggccatattctctctctctctctctctctctctctctctctctctctctctctgtgtgtgtgtgtgtgtgtgtgtgtgtgtgtttgtctctctgtctctctgtctctctgtctctctgtctccatctctctctctctctctctctctgtgtgtgtttgtctctctgtctctctgtctctctgtctccatctctctctctctctctctctctctctctctctgtgtgtgtgtgtgtgtttgtctctctgtctctctgtctctctgtctctctctctctctctctctctctctctctctctctctctctctctctctctctcggcatttccttcttaccaagtttctggctttgtctatgtgcttggtgagctccaggtcagtgaggttgtcctctggcctctacgtgcacacatgcacttgaacccccacatgggcattcagacagacagacgcacaatgccccccataacctccctccccaggggtctcacaatgcatctggagcaccagaacatgcaattatgacaccttaaggaactatatggtgttaatatgtacagcagtctccagcttctataataacatgtcatccccatgacagctaccctgtttcatatccactcctgggcaatgcctggttatgattcagcctggtccgtccccagacgttgccatggcccaggcacacatccatggatccagctactgcccttactatcgcagcctcaccggtcccatcatctgtcatgtctcctgggttttggttgtgacagtgatttagatatttcttgatttaatgatcctaataagttttgagcagctgcagttgggggcagcattctcctgcactgggattttttttcattaacctaggtccatggtgttgggaacagaaatcatagataagaaatgccatttttagttacactcctagtaagggtcagtgttgtcagcaagattaactactaatgttgacctaagttgtactctcttaatacaagaggtaacacatgcagactattttataacccatttggcttttaggacttatatatttatttttgtgggactagacattttccccttaattaacttttctgcttgtgtgtgtgtgagagagagatgcatgcttgtgcacatgtgtggaggcctgaagctgacatcaggtgtcctacccatcatgctccactttctttcctgaggcaaggactgttacctgaacccagggtttgccagtttggctagtgtagccagccactagccttggggtctcctgtctctacctcctggtcactgggatggcatgtgggtgactatacccaccaagtagtggaaagcaaagtcacacaggtatggcaaagtgataatggaaatctgggggaatggggagtgtgttgtaattttaaaaagaaagataccatgcaactgagcttgagtggaggggttttttattggggaaaagtaaatgggaaaaggggggagaagggaggggagactggcctttggggacaggagtggcagaggtgggcagggtccttttaaaagggagcatagtggatatgcacaggtggcgctcttagtggccacagctgagggcgtgtcctgtcagaaccccaagggcaggccagtgcagatgcctgaacactaacagagtgtaagacatggagtttggggtggggtagggttggaaatggtctgttgcactgggtgatgagctcatagaaagctcttcacaatgctctccgcttgacatttgacaaccatgactataacgaaatgcccatggccatcaatttaaaaagagggaagacatattttgactcatggttttggaggttttagtccatgactgatggtctcattgccttggggcctggagaaagctgtgtatcatgggggatctgcctacctatgacagctagaaagcaaaagcaggaagaaaaaagccccatctgaggcacccccggtgacctgtgacctttccacagaatctacctcttcaaggtttctccactttgctctagcactgctctgggaaccaagtttctagcctgaggcctgccggttaatacttatccaagatcctaactgaggcagtttataactctttacaattacgactcacatgggaaatgtaagttacagttaactagagataaagtctctttaggctagattaatgcaaccctggtggggtgtgaacgcttctaaacctcagcctgtatgtggtccacttgctctgcgaggtgcctgagccttctaccccaaagctgaatgcttgcttctggtgcctctgagcctgggcaggaaggacttaactcatattgtaccagatgggggattggagctcagcctggagctgagggtgttgtgtggttaccctttccagggtaggcaggtctctgtgggtggggctgtgggtgtaagatgggacttttgaagaggttcactgaccactgaatggctggagccaagacagtctttcggtggtaaaggaaagggccatgggttgtctgaagggatggaaatcagaccatcctggccagagaagggtttagagtgacgtgtatactatagattgttttaactaaattggattaggcatcaaaatcctttagatattgcctagttctctgtctccctttggggctgtgcttggtgggaaagcatcttcagaagtacagctacagttcgaatgtgaggcgtctcccacaggctctgtgtttgaacacttgggccccagctggtggtgctattttgggagactatggaacctttgagacatggggcctagcagaagtgggtcgctggggacagagcttgaaggtgatttccctttctgctcccagcccggggcctctgcttcctgattggttaagatggcagcaggtcactttccaggctcccaccaccatggactgagccattccagctgttagccccttaatgaagagccaaaatagaactctgtccccttaagttgcccctgtcacatatttggtcagagaaatgagatcagtaagtcactcaaataccaaaaatgaatgttctcccataactcttggttcatcagagttggatggaaaaggggcaggtatttaattttgattaattttgatttttcctgtaggtagaagatagtcaggaggaaggagagcgtgtgagaatgccccacccaccttctctgtggcccttagtaacagccatagaaatacaggctccagacctcagcttccataaagattggagcaatgtcactcccgagacttgatgtgaatggcaccgtgtgtgtggtatgtggtgtgtgtgtgtgtgtgtgtgtgtgtgtgtgtgtgtgtgtggtatgtggtgtgtgtgtgtgtgtgtgtgtgtgtgtggtatgtggtgtgtgtgtgtgtgtgtgtgtgtgtgtgtgtgtgtgacctgtgaccccaagccatcactagccccacagaaggctgattggcctctcctttggcatttggagggctcaggacaggacatagaagggtggagtggtaccttaggggacgaggagggagggtacacatcagacagacaagattctgaaggtcattgtgatatctatacctatgctggagtcaccatgcaaagaaacatcttatttgttgaatacccattttagggctgtagtgacaaagccctggcattaccaggagtgatggaaggcataggtgtagacaatatgaaggcaaatccatagttgacctgcaatatgagactgggggtcggggacaaatgcagagtgcttttgcctcttagaccatctattcagatccttccttaagctgtgaaatacattactttccacacgggcttttcccttgctggtaagagtagctcatccactttggagaggccctcgtttctaaaccaaactgctaaaggaccttaattgagatcatttcaatatgttaatacatcagttcctttctccagtgcatctgagtttgggactggagcatgcctcaccactctgtatgcaccagctctccacacccgaggcttatcacaagcaattatcttacccaaataaaaaatgaaaatggaaaagttaaataaatagcaggacaccttgatggaatcgcagtaatgctcatcttggttaacattagccctgacttttggacagctcgctgtgttaatgcgtgtcctttgtttaggcatctatctctgggaatctctctgctttccaatgtgatggatagcagccatctctgctctccccaaaagcacattccccagtgaagctccaatcctcactcaagtgttgcttatactagagaaaaccctgaaaaccgaattcaccccaagtgcacactaactcaacagtaggctctgcattcgctgtgggctccagcaccattcagggcccagtgaactggaactctgaactgcagctcaggtggcagtcaggatgcaccaggctggactcctgcagcaaacagccctgaacctcagtcactgagtgcacatctgcatctgattcttcttaagcaaaactcactgtgggcactgctgatttttcagggaagttgcccttctggtctccagtacagcatctgaatgactttaacattttagcatctccattccagcgtgtactcgcacagttgccacagcaaggagggggggacgtctgggggcttgggtaccagagagtgattccttagcaagaagtgacaggctgttcccagtcatgaggcattggccagacttggccacatggtcctaacaagcaccaaagggtggggatgtgtgcctggaaatgaaggaacactggtgaacaagagctgttagccatggtggttgcttcttgttgttcacaagggttggccacaacttagggtcagccagctgggacttcagtattcgggactcctaagacacttcctatgtgctctctctgtctcattctgtctctgactctcctctctctctctctctctctctctctctctctctctctctctctctgtgtgtgtgtgtgttacactctctaacacatacacacacacacttacacatgtgagaatgtgtatccattcaacacatagtttaaacatattgtgtaggtcataaactagctcacacccatgtgggattcacagtaagatgagcagggcctacagaagacagttcccatactgttgacccacaagtaccaagcatcccctactgtcagcatcagtaccagagtgggatatttgctaccatgaaggaagctacacaccaccagcgtgcagagtctgtacagacccctgctgtcccattttctgtggatttggacagatgcaatgcatgcaggagccattaaaatgcaacataaaatctgactgccctaaaacacctccatctttgatggttcattcttctcttctcccaaccccggaacaacactcatctcttcactctctggattcaccttctctagaatgccatagaattaacaacataccgtatagcctatgcagtttgacacatttgtgtctccatggctggatagcttctttttcatcaggattgggcactgtgttccactcacctgctgaaggacatcatgctgcccctgagtgttggcagttatgagcagaactgctgcaaacacactcttacaggatggccatggtgcaaatataagttttcaatccaccagggaaatccaagaagcttggctgctgggcaatagggcatgtatatgttgaatttttcaagttccccaatcatcctgattggcgtaccatttttgcatcgccacaggcaatgcatgacaattcccatttccctgggacctttggctcttgcaatattttctcttgctgttttgtaattatccatgaaccttgggaggaggggtggcatagatatctcttttggggatgagaaccccaccttctttttctcttcacactgagcagttgtgggtctctatgttcattgccacccactgataaaagaccttctctgatgaggattgaggggtgctctactctgtggcataacaagtcaccaggagtcagtttaatactgtgctcatttagcagaatagtagtagtgggttctcttacaaggcctatggcctattcgctcccaggttttggtcctgataactatatcagacatgagttctgtcttgtgaagagagtcataaattcaatcagaaagtggttggttactcccataacactgtgccactattgcaatagtggtcctatcctgtcaaaatgactgatctatatcccagtgctcgcaactgggtaatactggtgttcccttttctcctccagtactatacacagcaccttctatcactatgaacgctagcgtgtagggctgactctcccaggctgacaccttgatttcttgatatctcatggctcaagtaaccagaatcttcagtgacagggtctcagtgtgaggttctggagggtaactaagaatagtatctgtggcctgtaatatctgggggtagtttatggggggctatatccccactaacagctccaaatatctcatttcccatcttcttagactaatcttgtcaagtgcaatttggggataaagccacaaaataaaaacatataaagcatagaaattatcatccaaaggaagggtgagtggcctctgggatgtccatccttgggatcaagaaagggtattcagccattattgtcacctgttcatagaagattactttcattgtgctgaaaattcctccacttgggaagacataatccttcctatggtcccaatggaaaaacaaggcacaattctaccaaggctcactctggggaaccaatgagtttattgggtttacttacacaccaatgggagagggtttaggggcaggagtgtcagtcattttcaattagcaaccctgcaaggcatgcacccagcgtgagtgatgactccccatggctgtgcaggtggactcctcccccctaatcctttccccatatcccctacctcttccctgagaccaaggggccgtatgcaatcagggcagaattgtatacaattggctgggaacagtggctgggacctggtacctatgtgagggtcccatgaccctccctactcacttcttccaaaaggtacatcaactgtcaacaaacccagctgagatgatctttggcaagcagacctggctggactcctgaagatggcaacagtttggcttggaagatagtcctgtacaacactgtgaaattgcaacccaacatgtttcaaggacaatatccctagagatgtagcaacttctagttagaaccatggtggaagccctagagggcactgggagggttctttctctctgctggggatggacatgctgtggcatttcataggctttggagtttgttgaactctgaggatcacatggtcatttgggtgttgctattctcattactgttttccaatagaagctcaagaagtggttttgagtagacgtatttcttcttttgcctttgacaaggctgaattgctgggctgggtcctatgaagtgtggtcactcccacgcatgtatagtagtagaaagaagtgctgctttggatttgtttactcatttcacttacccctcaacaagtaaaagcaacgacttatgtgttctctactacagcctgctcctcttcacctgatacccctgcccctttccctttgtccctttatgtaggaatgtgtgggaagctgattatgagatttctttccatggtggccagggtgagggacaatagtgtgggcttcagttttctcctctgctaccataagaagctgtagggagacactgtagccccgcctcctagtggcccggacaggcccatgagggcgtggtgagggaaagtctaaggtgacgcaggaacggttcttaagggaccgagcacacgtggagaccctcttctccctgctcccttctcctctctctggcctggctgcctttggcttgcgcttggctggtatatctgaataaagaaaaccttggccttgctgactgtggatcgatcactcaacaggaagcctttttgtttgtgacattaagatgccattagaggggggatcaggacatttgacatcttgttggtgaaggatctgacccacagttcagctttcattcccagatttactatattgtcctcacctagattttacttgagattttaagaaaagactaagccttgtgtagctttcccaccctccttactctattccagaacatgtgggggagagcagagctgactgagaagggtggggagatctctagagaatagctaatacttgcgtatatttatctatttatttatactttttaaaaatgtcttgatgaaaagtagagagaaatcaaatgacagcatcaacaataaaatacctttgagtccatcacatacccagcttaggtttgttgccctgtgtcagctatcacattcaatttaagggctattgagacttccacagagggaagcaagcacaaagagaaaaccccattagtggatgacattttggggacagtgggattgcttagtgggcaaaggtgctttctgtcaagcctggtgacagagttaggtccctgggtcccccatgatgggaggagagagctgactcatgcaagttgtcctctgacctccacatatctgtcatggcatgagcacatgccttacacacacacacacacacacacacacacacacacacacacacacacacacacacacacacacactaaataaacgtaataaaatatttttaaaagaaggctggtgttatgaatataaagaaagagagtaaccatctttggggctcacccttgctgtacacgagtgccccctgcttcctcccatctaaacttatatcaaacccctttctaaaactaagaaaacacaccatgaacaaactgcaacgaaatactctctgtgataattgctaggtggacagaagaacgtgattttctggcgcaggtttagaggcttgtcctaaggaccactaaggaaacaggccaaacaccaccaatgtatggacagtttggagggcagccgttaagtttctctcttcatcatgcgctgatgggggacatccttctgtgtatatgtttgtcttattggttgataaataaagtactgttggccaataggaaagcaaaataggtgggactatgagtcaaggaggattctgggaaatgtagtaaagaagtcttgtgatccaggcagaaagtgacatagcaggagactcagaatataagcagggacaaagaggaagtcactctcttcctcttcctcctcctctctgtggagctgccatgtagtccccacaagacaggacacattccgccaacgtcctccataagataagtcttatgattatagttgataattaagactgagctagcagataagaaatcctagtcattggccaacagcattgtaaataatataaaactctgtgtgttattttgggtgcccacgtggcagtggggttcaggcggcttggcgtaaagacttactgtaacaatgacccatgataaagagtgtgttgtgtgattgcccaggcacagggcttttgtcctctcaatggtgttgggctggaggtcaccctgaggcagcagatgctgctccctactgctctgattgcaatatttcagatctgagaggccagtgatgaagctcaggtttcctcaggggaggcaggatggagtgggggacactccctgggcctgaacacaggaagcaggatttctctgggtctctgtgggggaaggatggcatgcagatttatcttcagaggagctgtgacaacagaagtacctgaatgagatctcactgctcaggacccggatggcacaagtcctcaccttggccgtgccctcctggggctttgccttagcttccttcttacactcctccacgcagggtgaggaagcccgggatcaggatatgtgcccactccgagatgcactcagcctcatcatctgcactttctaggtcacactgtgagttcagaaagtcagaagcctccgtgtctgtggggttggctgtgcctctgtcatggaccaggtctgcaaaggcacaggagttgctctgtccacacgggtcccggaactcaggttcgctgtagtggaagacgcatttggagcttgggtgtcctggctggaatgctgatgtgtgtgcgagacttaagttgtgtagaatgcagctaaggggagggaagggaagaggctggaagggattaaagggagaggaggggaggagaggagaggggaggggtgggctctggtgggacctattctctctgaaccttcatgtctcttcacagaatgctaaggagttgagtttcgagttgtaactgtgctacagcccctccaggttgatggaagatggattcataagatatgagggcagacaatgtcatctctgccattagcttcataggctcaccagagaatgagtcccccatgtgtgccctgtccaagtgtcagtgtcagtagtagtcattagaaattgccgaggatggccctttagagatggcagcgcaggggcaaaggacaaggcagccaagatctgctatctcttcccactgagccagtcggacttagtctggtcagagtgtgctggaaatcgcaacaagtcgttctaggcacaatggattctttcctctgggggtttgcagaggcttatcacaggtgtcaatcattttgtgagaggtacgctgttcatggtaactctcagaaagaagtgaggcttttagatgtgtgaattgcaagaagatctctccatttgcagcttcctatgttacacacagatgccacgtccacacaccacgcacatactacacatatttcacacatgcatggcatacacatatacatgcaccacacatgacacacacatatcatgtatgccacaatacacagacatacaacacacaaacatgcatacatgcacatacatatatcatatataccataaatgcactcagttatatagatattatacacatacatcataatattaacctcacacacaacactcatatacacaatgtgcacacacactcacactcacacacacgcacacacatcacagagatgcaccaatatatgtatatgcaccatacatatcacagaagcaaacacatacacaagcatgcatatacacaagcatacacgcaagcatacacacaagcatgcacatacatgcacacatatgcacaaacacacaagcacacacacacacacacacacacacacacacacacacactttggagagcttctcttcctcctcttctcacttggttggcgttaataggcttttcttccacctgtctgcatcctctgcagatgggcttttcaagagttcctgtgctcatctttgcagataacaggagttggcagatgttttttaattaaagaaattcaggttatgaaaaagatgtcatgggtagagagagaaagggatcctgccagccacaaacccctgctcacatccacttagccccagcttgcggcatctgcctccagattctacaaaatgccattgtcaggagtggggggtggggtggggagcagatgtaggttccggagctgccagctcctgattatctaacatttggggtgtggggccaatccgtgagtgtggtgcgtcatggaggacacacaagcagctctgtagccgcatgtttgacttccttctttgacaaagctcccatggagctctgcagggctcaaggggtcttcctgacaccccccctttttttgccaaggacagcaagaataagacaaaagttgaacatacttaatccaaatctaaaattgaaaatggtccagagtctgctgctctttggacaccggcgtgactcaagtggggagtcccacgcttgatctcatgggacaggcagtagacatgcaggggcacgaaaatgacacacagaatgacctccaggccacacgtacaagatgtgaacggagcatgaatcattttcgtgttcagatttgggtaccagccctaagacattgtctcattacaggtgtgcacatagtctaaactgaagtcagtggtatctgaggcatttctggtcccaaacgtttccattagggacgctccagtggtacaaaggacagagcagcgagcatcctccgtccagcactctgacttgttagccaaaccatgcacttaagtctgcagcgtgaactcaggcatctccctctttactctgctgtccacagcgggtccctgaccggcttcccaccctgtctgtgacacagcaaggcccctctgctgtgcactgaggactcctgtttctcagaactcacagagtatcttctgaccttgctgattaaaatgggcagtgaacactgttctttgaactccctcctgtgtcagaatctttttcctgtgtgggtatgttcatgtgtgaggaggtacatgtgagcatgtgtgaacatgtatgtggggggtccaaggtcaactttggttatcattcctcaggtgctattcacattattcattattattattattattattattattattattattattattattatagacatgctctctcactcaacccagagcttgctgattctgcaaggctgcctggccaatgagtctcagggacctggctgcccctcaactcccatcactgggttctggtgatgaaactcaggttcttatgaattgagctatttccaccccacttagggatctattctattatgacttataaaaatatgaagatgtaaatgtatatagaccccagttaggcaaaatgaatgtgtaagtgagcagattaacaaacattagggatggcggggttgtgtataccatgagacaacatcctacctaaataactttggatttcaaaatgtggacattccatgggctcagcaaataatctcttgtcttaggggctggtggaaaacagtccctgtcttagctcccaggaattcgctagggcagctagacattcagaccagtactgtctgatggacataataaaaatgccttccagacataatttacgtgtttctctagagcctacactaagaagcaagaatagccagctgaaaccagttttaataatatttttaacccaatattctaaaattattcctatgtcaacatgtagctaacataaacatcattaatgtaatgctttagatacaacgttgggattttttgtgtttaattttcttactaaatcttgcaattcaagcctgggtcttgtgcccggtttggggtttgactttaccctcctcagaagccacttgcacagcctcaggaacactgacagagcagatggagctcttggggcagagataaaggacacttactgcccataacacagcaagccacaggaacaccaacttctgtctctattggacagggctgcaggatggcctcagaggtgccttggccagggttcaccttccctgtgctgtggagggttttgcaggtgtagcgtttgtgcctctcatgagcctgaagcgggagcttaaacaggtgcagctgatacagtcacatggtctctaaatctctgtccaagggtcagaggtagagaaggcaggcctggtgcaagcttgtaaccccagctctggggaggtggagacagaagatccctggggttcaccagccaggcagtctagccaaactggtgaactccaggccactgggaaaactgtctccaagagcgcatccctgagaatgacgcgcacggttgttctctggcttccatgcccatgagtgagccacgctcacatatgcacctgctcgtccactctctgcctctcaatgaggatttgataggaagaaattctacattactgattctatctagcaggggtcctgtggcctccgctggctgagagaaaagtctgctgctgccagccaaccagaaaaactgaatgagcttggacgtagagtgccccacccccaagaacacatcaattcctgatttaactggcttctcagacctgagcagagagctcagaaatggctgctgttttaaaggactaattggctagtaatggttttctatgtaatgcaaaatgaacacaaccccaaatctcatgagggtgagtggaaggcccagacagacgcagctcgcatggcgtgggtctgtgtcacggagggaggcgacctggagcttcgtaattcatcctaagcacgcaagaagcaagctggttctgcctcttaggagatgctgtcttccccccccccagttgctcattgggaacccagtccttagaaacaacccaggaatacaacgggttagcgccttggatcagacgtccaccaagaggtgaatgggtacaggaaatgcagtggatgcgtggacacagcagggctctgtcggcctttgagagaaatggagtgatgactcttgcaggaacatggctgaactacagattgttgtgctaagcaaataatccagaagcagagatccacaccacacgctttctctcatatgtggaatgtatgtttaaatacatgtacgcacatatgtagggcatggagctagaaaaggcaccatgaggcaggtgaaacattctaaaagggcagggaacagggagggtagcagaatacaaatggagatatgaagagaggccttccaacatcaccagtgctagacacagcaaaggaaaagatgccgagaggcctgttagaagcttgagggtgggactctgtggccttcccttaaaatataaaacctggaaacggttgtctttcacaataaactattgcacacttcatgaaggcttgaaaggaggttagagccttttaccaatatggcaaaagtaagactaattagaccattagtgcatgccgtgtggatgtttgatatgtcacactgaatcccatgacgtgtcagttaataggtaccaaccaaaatgataattgtaacaatttgtcctggggatgcgactgagttgatggtgtctgcctggcatgcgtgaagtcctcggtttcatccccttcatcagcacgatccacattctagatgccaaaaacagctggtgacgaaggttaattgccagactgaccaaggctaggtacatctccccttttcttgtgtacttctgagagcagacagccaagttcagctctgcgaaaactaccatctgcttctgaatggtagggaaggacattttcacccatgaggcccagagagaatgtggtacgccatcattttaggaaggaagtactttcaaattcatggaaagtaagttttggaggtacagcccagtggagtcaagcttgatcattgaatgtcatagaattcacacactgatttaagctctgtctttgaacaagtgctatccatttttgagacaagggtctggtcagtgtcaatgagatgagtgagaaccagaaggttttaagctttcgcacatcatcaaggagatattctgcacaccatggagaaataaatgttttcaacatttttaaacccctgtgaaattaacttctaaattactcatataaaggtcatatgtttggtatgccaaataccagtttttgatgatgtttgtgcaaacttgctttgtagcctagcctatatgaccaatttctattatttgtaaacagaacaaatatcacacacacacacataagttgtcttgatagatctccatatgtatttaaagtttgttgtatcaccgagtcctgtgtattattttaaaatatttatttttattatttgaccatgtatgtgtgtgtgagtgtgtatatgtgtgtgtgtgagtgtgtatatgtgtgtgtgtgtgagtgtgtatatgtgtgtgtgtgagtgtgtatatgtgtgtgtatatatgtgtgtgagtgtgtatatgtgtgtgtatatgtgtgtgtgagtgtgtatatgtgtgtgtgagtgtgtatatgtgtgtgtctgagtgtgtgtgtgtgtgtgcacacacatgtgtgcaccctctgaggcatcagatccactggagctggagttacaggcagttgaaactattccatgtgggtgctgggaattaaaccctggtcctctgcaagctgggattacttagctactgagccatcactccagtcctccggtgcatctttcttattttcctgtctgcttgattagtactatgtaagataaatgtgtgtgtgtgtgtgataactttaaccatgatgaataatacatcaatgtctcccttaaagtctattgacttttgttctatagatatataattagataaattatcatatgcctagatatttgtaattgttttacctccctgttgcattgctttttaaaataagtaggaagtgtccttaccattgacaattattgaactctgtttaatattgatatggccataactttttgctagttgtttgatgagaatgttttttcttttattttgatactttttttttttttgagacagggtttctctgtagctttggagcctatcctggcactccctctggagaccaggctggctttaaactcacagagatccacctgcctctgcctcctgagtgctgggattaaaggcctgtgccaccaccgcctggctgattttgatactgctatgcacttatattttaggtatgccttttgtggctgcaatttttaaagtgatacaaatctttgcctttttacgttggaagtttagtccatttatgtttactagaattattgataagttcagatggattgtctcaaagatttcattctttcaacttatgattttaagatattttttctctatactattactctgaatcgaatcaactttcttcgttctctctctctctccccccctctctctctgtttaagatcgtctattctgtcttttttgtgataaatgtcacactgtaacatgtacacttgactcaaaagctatcatccaggattgtattgcatgttttctaggagtgatagacacctgtctggattttttaagctgtttttggtctgcactattacaaaacaaaagaatcacaaaatatttaaactgccaccatttctccatattgtcatattttaaatcattattgatccatattgtcctttctacttcttcatattttcctattttcttgtcacttatttacaagtttatcaattcttttggttggttatcatttttccttatgttttatttatttatttatttatttatttatttatttatttatttattgaaacgtgagcctgtaggtttaagatatctttatttagataaataccagccaaacgcaagccagagcgtgccctgggcagccaagcagcgaggccagggagaaggggcctccccatgtgctcgctgtactttaagaacctatcccgagtcattctgacctctccttgaccacaccttaacaggtgtggtcaggcacacctgtagctagcctctaacaggtgtggcttactgtcacctacaatttatttttggtttttcaagacagggtttctctgtggctttggaggctgtcctggaactagcttttgtggaccaggctggtctcaaactcacagagatcctctgcctctgcctcccgagtgctgggattaaaggcatgtgccaccaacgcccagcttatgtttcatttttattgttttaatatcctttccaagaagaagcattttagtggttcttccattgagggattcctagtagcaaattttcagttttgatggtgtgaaaaagccaagcttacctatatgctacatactttctcctctgagttttatgtgattataaagcccctcaattttagattgtgccttcaatcttaagtgacaggtaaactgggtataaattctagtttcacatggtgcagtagtcaccactgtgccttcactcttgagtgacaggttaactgggtataaattctagtttcacagggtgcagtagtcaccactgtgccttcactcttgagtgacagattaactgggtataaattctagtttcacaaggtgcagtagtcaccactgtgccttcactcttgagtgacaggttaactgggtataaattctagcttcacagggtgcagtagtcacaatgtgccttcactcttgagtgacaggttaactgggtataaattctagcttcacagggtgcagtagtcaccactgtgccttcactcttgagtgataggctaactgggtatagaagtctgggttctatttttcccccaaggagctttaaaatacttatgcctactcctgaaaccctcttctttcagctttcgacactggacctgcactctgtagattgcacttctccccaccctcaggcttagccaatagagagccctagagggatgctgggacaggaagcaggaaaaaggagccctttcattttgttgttgtcatatagttcctagttcatctgtgactccctccagtcagcttcttcgtgaccacatcagagcatggagctcaacaactctgtgtcagcagtggccagttggtcaccatatcagcagtcactctgttgctatgacaaccatcacttctcctcctcattctgctgttcgctgttgcagggcacctgcctctgcctctttcctttcccggtcactgccctccccaaccaatgggtagtactttctcaactattaccctgtcttctttgcccacctgttgtctgaccaccttttattagttaattatttattgcattaaaatttttctgtctgacttacaggtttgccttcaatttcttgattggactgactgatgaaatattatcctgctgctttctgtgatattttattgctgtacaaaagtgtgttatcagcaaaagacccaaatagatactcaattgaagaagatatatgacagacagtaagtttatgagaacatgtttgacaatgttggttatcagagacatgaaattaaaaccgcaatgagatgtcactatgaatccacctgaactaagacatccaggaggaagtacagtgatagttagaactttctttgagatgtacacatacattcacacacacacacacacacacacacacacacacacacacacacacactcacacacacacatattcatacacacacacacattcacacacacacacacattcacacacacacacacacacacacacacattcacacacacacatactcctgcacatacacacaagacctctaaataaaataacaacaacataaaatagatgattgatggataaatctatgtatagataggtggagaactatattgtaaagcaaatactaaaatattattgttaattgtcataggtacttaccataaattttcatcagttctgctgtgtcattaaagattttataatgagatgttagaaaaaaatggctgctgtcagtctaacaatgattttcaaaaaagtaatctgttttttccattattttaatagtttgtgtatatatgtgtttgttcatgtgtctgtgtataagtctatgttttcatttgtgcatgtgtttgtatgtgtgtatatatgtatgcttgtgtgcatgtgtatatatatgtgtgtgtgtgtatatgtgtattatgtgtgtatgtgatgtttgtatgtgtgggggtatgtatgtgtgtgtatgtgttatgtttgtgtatatgtatgtgtgagtatgtgtatgtgtatatatgtgtgtatgtgtgtgtgtgtggtgttctgcaacttcacagcaacacgttaaagcactaatttacttcttgcactcagaccagggctcacaggctgaagccaaatttagccattatttctttgaatattgcttttcttctcttctgggattctcactagatctgtgttgaaaggtctcatatcaccatccattctcatatcttaatctgtacttgctatttccctgttttcctatctaccccacagtgctgttgccctttaactaatgaaactatttggtttttccagatttttcatccttggatccccgattcagtttcctgattctctcttcagctgtatcaagactgttggttactctatgactatagtttcactttcggaagctcttgaccactgcttgtttcatgggggcatcatcctaacatcattttgcatcttaatcttggtggccagagtggacactcccaggttagcacctgcggctcgtcagttcctactcactgtggattgcgtcttcataaatttggaaagtcccgtgtgctgagtaggcattgtctgaggagctttcccagcttgaggaggtctctgtttctagagaaaattttccatttgtctctgcagagcacactagaggcatgggcctgaatcacttttcacaataattttctgctcacatatccagaataacagaactcaaactcatgtgaaggcacactggctttcaagagttaaactgggggaggggactgtttacttttttccttttctggagcctcgaataaagcagctctttctgaactggctttctgagtgtagactggggcagcactcatggctctgagtgtctgtggtggggaggggaggcttggccttcactgcacccaaacccttgcatgaccagatacagcagacgtcccaacagcagctgcagcgtcagctcgggtttctgttttgggtccctggaaattttcctcactgtcttataaacccagttattacttttcaaagactcttcagtataatctattcagcattttctaggtgtttcatattgggagtgtcttcaagccatctgattgtctatagcaccggaaatgaaagccggcttagccatttcacacagattatttttatcattccttcataacaatccaaggggagctgtatgattttttgcaggaactctaggcatagagaagttagttagcctcctctctgggacctacaggcgagtgaatgtggcacactgggattccccccaatgtctgcctgattcttaagtctgggctttgtcccctgtgtcacaagggtactgagcttcactctgggccgggtagcttctctgagtgggagtcactgatgttagtgaataactcggaaacagcttcacaccaaggtgtgtgtttccatcttctcgttctccatatggaagttggtcctgagtcctcttggtaggaagtaggtgcgtttgaatttctcctactgtcctccgcatccgacctccgcatccgacatttggactggctgggagaacacatcccatgtgcccttctgctgcctgataacaaaacccagtttctaagccctcggatccctttgtctcctggtttgtccctgcccccactgttttattgagtttctttgccacgatttgcagatatcagaggtgataagccagcctctggtggtgatgctacctgcacacagctgccttggtttgctgggatgagggttttctgaattcagggatactcagttctggaaatgggagaattctgggtcagccagctcagatgctctggggtctgggtagccagtcttctggtgtccagatttccacagagatgaaaggaaaggaaaggaagagtgtatatgtgtgtgtgtgggggggggcaagactcactttcagggacacgtgcgatgaaatgaagcttcccaggtattccccagctgttgctagttacatcccgatggaagatggaatggtcagaagggcagcatctgagccacaggggaagggaggtaagatttatggagcatgtacgctgtgccaggtgcttggttaaagtcacagtcagtatgatgtcgttcagcctgactagctccacgagacagacagcattaagacatgtcagagggagactggggctctgcacagtgcatagtttggctttgtacatacacactgatgcccagcttcagacctggcaggctgcactagcgcaggggatgtttctagctgtctgtgctgaggccgagcactgctgctcagaacagtagaactgtgggtcaaggaggaaaaagggacagcggtgggttctgctaactttcccaggccttgcaaaacctgtcactaccaggaagtagcagctatgaccactgttccagtggcctgagagctccagggaagcagtgctttcagctggcagcggctccaagcttttagcttctcacaacctatgtggatcactgtcttgctttggagtatgtgtgtgtgtctctgtgtgtgtgtgtgtgtgtgtgtgtgtgtgtgtgtgtgtgtgtgtgtgtgtgtctgtctgtctgtctgtatgtctgtctgtctgtctgtctctgtgtgtgtgtgtgtgtgtgtgtgtgtgtctgtctgtctgtctgtctgtatgtctgtctctgtgtgtgtgtgtgtctgtgtacacccagccaggagaagtagttttcctatactttcagccctgatgtccagagttctggtggttccagagcctttgctgtttggtctgaggccatgagctcagcttatcatatgcctacctgctcatctgcagaaaaccagcgtccccataacctgcctgtcacactgtaaatgctgtttcaatattaggcatcattagggcatcccttcttgataagcacatctcagggtccagtggtcaaggctgcttttaaaagcttttcctaatatttgcccagcctgcttccttctgttctctttgctgggcttttctctagcagtcgtgtctggaacacgaagctcttttgtgtggtcttttaagtcacctgtactgattttctgtgtccagagatgttatgcttggcagcaagctctttctttttctcaaatacgagtggatatttgatacaatagattattacatgtttcggtgtataaattactaggtcttagaagcaagaaatgagtgattttgccctgaggtaatataacagtgactgtagactcagtcaaatcaattaaacagatcacctgtggtcagggcagaggcacggagtcactgcctgaaaagcattaggcagctatcacctcctgtgttaatcatgggacagaccagaggttagtttgaggcgttatttaagtgctgggacaaaaaaattaaacatccagcccctgagagaacggatactttacccaaattccttctagagaaaattaattgaaattgtgatttttggtcaataaatgcaagtgttaggaaggtggctactccaggaagtcggtgcgtctgaatgactggaggggtgacctgcacagctgttctgggaggcagggagtaggagaagaggcagcacaagccagatgcagaagactgccttcaattgccagctaagtggcatgtgttgaacacagggctgtgtaggtgtccatgcttattgcttactggtggaaaggttcaaggtgagttacatcatcaccaagtttcacttttctcatctgtgtaaccgaagctctcgctgtgatggtaaatactggttgtcagtctaacagcatctggagtcacctaggagacaaatcactgggtacatctgtgagggcgtttccagagcaggttggggtgggaagtcctgtcctgaatgtggctgagctcctgcagtgaataagactgaggaagtgagctgagcaccaagcttaactctgttatctgacatctgactgcagatgggtcattcttgtccccattaccacattgtccctactgtgacagaccatacccttcactggacctacatccttactgggacagactgtacttttgacctgggaacaaaagcaaccctccttccagagttgcctttgggggccattttccttcagtggtgagaaagtgactaaaacacttgccaacccttagcacaggactgctattaacatttaaagacttgttgcctgtgaacttcgaggcacatagtaggcactcaagacaatgaccatggtcttctaacaccacaccacttgaaagaactgaatgcttttctttccctctgggacagttccacagcccaggctcaaaaaaaatcacagctctggggccctgattgtgtcctctgtcctgtgtcccaactgaaaacaagactgcagttttctatgcttctcaaagggaaaccatggagacagccatgcttgctgcctgggagagaagaccatttgctatcctggcctcttggtcagcatggaccctttctttggcttctgtaattcaatgaggacccctgggtcactgggtgagcatcatctggtctgtgagtcctctgggcacttctccattttttatctagtgagccaaaaatggattggccctggtcaaatggcgtgggggaggtgagatgatctcatcaacctgagccatctagcccttccccacaccaccagagcagggaggggcagcattccccacaacactgaccccacccctcttccttgttaccgggagacccacctaatgagaatgggtggatcaaagtgaacttcttttatgaaagcatggagagaaagatactataaaataactctgtcagaaaccaaagttaatgtcagcctctgataattaacactatcaggcttgacagcagaatatgctaaataaattagtccttaaacgcttgtgtcttccaattataggtttttggtttaataattgcttcccagaatagatggagtgcttcaatattccgcttacttttgcctgtaaagatgtggccttcataagctaatattaaatagaagcacttgctcatccctgcctctacctgtacaatggagagctcttttgaatgacatttaaagagacttatgagaattattttgatgtgattcaagcaggtgtgtgtgtgtgtgtgtgtgtgtgtgcgtacatgcatgttttcttttatatctttttgacaggatctcatatatcttaggttggcctaaaacttacagtaaagctcaggatgaccttgaaattctgatcgtctgtatacatgtcccaaatgctggcatgattctctcatgcatcggttctctcccagctttatttggtattgcaggctgagcacagagctttgtgaaatgctagacaagcaccccagcacctgcgccacaccacagatcctcacctaaggccatcaggtatcttcttagggaagagtgccagcctgtgatggggacaatgatacaatcgttggtcttatgaggagaggagttagagtaggtgctcggagaactggaagggcctggtggtgtcaggaaagctccactttgcaaatgccttagacaatgaactttgggaagcagagaggcggcggggtccaggtttccagtgtagagacatggcgctgggggacagggacagggcagggcaacagaaacacagagcctcatcagtagcccaggctccttgaagggaccttagtaccaaaagtgtcccacgtgttcagagtccttgtgtccctttaggctatccctcaccagcccatatccattgctgaccagcaaagaggccagaaccacagtgttagtccacttggtcctgatattctccagtgccacacagcttacttttaggcctaggacacagcagagacactgggggcactttggagacatgtgcccagggatatcacttgaggtcatctctagaaccttggcttggagagtagggcaggcatctcaacccacctgataaccttaagatacaggtttggaccaagcttgtttggagcagagcctgaaatttcacatttctaacaaactgcccactgccgtggattcaccaggctctggaccactgaggctagcagggctccagcatcctcatctccccagggacagagaaccactggtctctgagacgtttgtcggcctgtcctgatgtgagtaacatctgtctatactggatgtggaagaaggtcagcatacaactgggccctggaataggttcaccagtggagggtgccaggtagggtgggcagccatgcttctgtgggccccaggggctaagccctaaggcaggcaaattggagtcatagtctgtcccggacagatccccacactgatgcctcagaagggcttgctgagtatgctaatgtgtccctcacacaggaggaccatttccatttattagaatttccttctgtgcccaggagagatgcctgtccatgtcctccaaggccatagccatagccgggtgctttgagacaaatccacacagaggaagcaacgggcatgggctttgacagaaagatactctggctcactctctctgcttctcgtattggggagatgttattatgttccagctacactgaaatgaaacacattttaaaggcttttttaaaaaaaataataatggaaaaagcagataatccaaagtgaccacaatttgaaaagtaaaggaatttttatttttttaaaaaaatcaggaaatagtttcattgtttgaatttagatataatcaaaccattgatttagcctcattaaaaagtgagtctttatcagagaagcagtggcctggtgatggagcagggcacactcacagcatacagatgctggggagacaggctttatgcaactttagaatgttaatatttttattaaaagataaatattgggattaatgagtgggctccataggaataatagggaatgtgccctcctttctctagaactctcctcttgacaatattgtgttgcttaggaactaacaaaacatgtctttctctgtgcctgtctctctgtgtgcctgtctctccctgtctctgtctctctgtctcccccttccccctttgtgccctgatgtttttccaggctggcagctgcgagggaaacaatgtgatttggttagggacagtgtcctgctctcaagtctggaaccaaacagataagaacttgtatgtcagaatacaaagtttacttagcgccagccaggggcgtttgatgttgcctgcccaatctggctccccatctttgaagttgtatgacacatgctagcgctctgtcaataagaaacaggcctttcttcctactggctcgcacatctgcctcctgggaacgccctgtgaaggcaggacatgatggctccaggctgttacagcagtagcaagagggacaatggttaagaaatggaaagtgtttaagaaaacccctaaggaccagggatggggactgcctgggaaaagatgggggcagatcagggctctctgagcagagagccagcctcttccggaggctgtttacacagggctgctgagtcacgtgggatctgccctctttatctggggcacggactgttactcagtgaaaaggcacattggtttgtagtgtcactctgcagtgtcatttaaactgctcggtaaatggcttatttgtcaaagaatattgctttttcccggaacagtacctagtgactgatggctgaaatctcctggtatcagaaatgatatcgagatggtgccctttgaagggacagaggcggaggtaggaaggcttttgttcttggaagtgaaagcatctaaacaatagattgtctgaggccctcagatgccaaacactgggcagccagctctagtttgcaacagaattcatctctctcagagtcctgggtgctccgttggtatgaagggtatgagggaatggccgccgcagggttcttagtccatgtgtttaccatgttagcccttgaagcaacttgatctgtgcccagcggggacacccactgtgtcagtgcgagagttcagtctcatccaagtaagagggaagataatgtctgtccttggtgtccattgaggccacgcctgagatgccaccaatggtgcctgtgagtgacctccccttgcacatggaaaatggcatgggggctggtcaaggaggcagatatggcagatatagggcacttcatcccattcaccctcagttgactctccagccaagctctgggagggtgactgtccccaatgtgtcctctttgctcactcgaggagagggagaattggtgaggcacaaggtgcatggtgaggggtggacgatgacaaggtaaacctagagcaggaccaactgtagagtgatggggggtggaggagggaccgagggcagatgcactgtgggggtggggggtgagggactggaaatggaagggatggataaggggaagacaaaggccacatggatggggtagattgcgcaggatggatggtgattggatggacagtggtgggatagacgagagtggagaggaaacggctggaccctccattttcaaggccatatgtactaggtgaccagcatgtccaggaggctgagatgaggatttgccgaagggctgaggggagagccagcctgttgtcctaggctttgtttctcaaggccgggcctggtgacccaaaccccaagaacggttctgacactgaagacttcgctttctgcccacactttcacacctccaaggctcaggtttttaatgcaccctctggaaagacagcatcatagtatatgctttccttatccctggcctgctgtccccacctgtcaccaagacgacattttgaggggtttgggttgcatctcggttgggtgagtgtttgtataacataaacaaagcccagggtttggccttgagcatcatataaaccagtcgtgaagccctagcgctggggagatagaggtgggaggaccaggagttgaagaccatgttcagccgcatttggtgttcagtgccagcccgggctagatgagatcttgtccccttttaatcagatgccagagtagacacaaggctccacactgtgctgtggtagtcagacataggcatcgagataaggagcttgagagtgaaggcccaggaagctgacagatgcaggtggtgtggagagagtgtgggaggcagaggggagggtacaggctgcaccagactggagctccagccacggggctcttttcatagcaagtcggtgtgctctgtaaagagcaaagggaaaaataaaagcaaatgctagtgcaatagtgacaacagcccatgatgacaaggagaggcaatgctgtgagggggggcattgcagtgtgctgtttcttctggaggaggaagcccgtggtctcagctggaagtcttaggttggcttttactgaagcaggccctgacttgaagtcccacacaactggtgtactgatggccaggtctcaggagacagcatcaaacagccaggaagaaaccagacaagggtgtcatggtgtgcagttccagcccaaccacaggaggtgctctgaagtcgaattgccctatggaagttgctctgttttgaggcaaagaggagggtgctaccacagtggtccagatatctgtctgcttacagggcaaaggccgtgacatccgaggtggctccaattggccaaggacaaccctgaggaagaatgtaggtgcagcaccttcaaatggaggcctgtaccctaaagggtgttggtgctctcattcagaggtcttccctacactgttgcttgctcaagtcctaaccctgagcatcatgggtctcccttcctgtgctcactgccttctgtccaggccctgtgcgtgcccacccagtcttccctttcttcctcctcctcctcctcctcctcctcctcttcctcctccttcttttcccatagctaaaccgttccttcctatggaggaccttcctcaagtcaaagcaagagctggcccatagcatttggcacttgcttagaaaagagcatcagaatacatcgcttttagccaggcatgatggctgtgctgtgcatacacatagtcccagtgcttgtgagactgagggagaaagactgtttgaaaccagtctgggctacctagagagaccccgtctctcaaacgactaagtcaaactattgcttttacagtatttttttcacatgtatttatgttcctaacaagccttgaaatcttgaaggacagagcagtttcattattcatctatgcacaaccaagtggtgtcctgcatgcctggcaagtattcaaaacagatgccgaataagaatttgttggacccaggaatggaggtgctgtgactatgaggtataggaaaggaaaagacacccctgcttcccatagagggtgctacctgcctgagagacttagggttacagctcaagttctctgctcccctttgtgtgagacactagacatccccagctgagctctgctcttcagggggttctggggtacacccacaaaagaaaaacgaaacccaagcagagatagcccatgtgtgctgtttgctgagttatctgaattccttcttgagcatgtcactttcttcctgtgtcctgccagcctggaccgtgctgcccggtgaacgggctatgaagcacctaggacacctgtgcctggactaacacagacagggttatgcacccaatgagcttctagattcccaaagctgggaaggagggagctttggggtgagaggcacagggaatatgtgtgattctgtattgtagggtgaggaaggaacaggaatattaagcgacttggctaaagtcacttaactaatcaatgatgagacatcaataaatttcagagaaatgtataaaactaagttctgctgagttataacttacattcaaaaaaatgttccaatttgagtggacagttcagtgagctttgaaatgtgctttgtaattgtgctgagaccagcatttctgtctcccccacccgtccctttgtagtcagtccctggctctgatctcggcttatagggatccacctcctgcgactgcaaattagttgttttttcctttctgggttttgcatctgagttttcgcacttggtatgtcacctggaatgtcacctggagaccccaccctctgtgtacacgccttgttttctttacaccgttgagttctgtttcaagatggcctcttcacctgggctcactctgtcatgttgtgggctttggttcctctccagactggggctatgatgaacaaagttgctgtgaacttttgtgcatacatgtgtgtgaccttgtgtgaccctgtgtttgtgttcttgggtaagcaaacacataggtgaggcgcttgctctcctaggagtggactccttgggttgcacagtgtttggttttacaagacatggtcaaaccacttttcagaaagactggaacattttttattctgaacagcagagtgaaggttgaagctgtggagctcagttagacaccacggttcatctatggggatgactggtgcccaggatacctgatctcaaagagaatagcccacgaagctaactacaacacagactccgcaccctgccctcacagtctgttcagtgcctctagaggaaatctggagttttcagtgttagggcacaggtagtccatataacactcattgggaaactgctatgcagttcactagacgttttcattttccagcaaaaaaatcctcccaaatagggacatctggtattctaacagggaaatggctgcagttaacaaatgccaacatctggctgagccagctgtttctgtctcaccattatctatggatgctctgaatgtgcagagacaaatgacatagaatggtggattacttccaactctttctgaagtgactttgaaatgtgtgtttattcttactttctcctagtattgtgttcccggaatatatgtcaagcaaacagagagagcgtgtttttctgataaagaaattcaggaattgctgtgaatcggctttggctccctttatgactaactcactgaggatacagacatgagcgccgtgaaaagaggaacgggtggttctccgatgttttgtgtgtgcaaatcttgtagagcagatgtcaggatggagctgaggctcctcccacctggaagctgcacccatgtgaaaccctaggggctgatgagaatggagacgccaaacatctgtaagatgttggaagaggtagttgatggttagtgtctctccaggtcaaaggagaatggtcgactgtctgggttctaaaactttttaggtaaaccaaaaccaagtgggtgttgccctattagcggctctcttagattaagtgtggtgtgtaagagacatgcctggctctccagttaaacctggatcttagctacctgctctgtttactggttgtgtcatcagggctaggtctgtgtgcacagagccccagcaacctcagctgccagatgacaatagtgacatctgtttcatttgccctccttagtggctgatagcaatagagatcacctgaggctacacccagcacctagtgtggagtcagcactcagtgagagtagtagtattgtctggcccctgctgagcacacggagtctgatatgcagagcccaggtgctccactgtgctcctccacctctaacagaggggtgcacagtaaagcacttaacctttctttgctctgctcccagggtgatgaaaagtaccattcctactcctcacacctaggaaaacctgggaccatttccccagtgagccagagtttctggggaacctgtcaacacaaagaccgttcttagctagtctgaagtctggccacgagtggccttcagacacctgtgtgtgcgtttgagcaatgctcaggtggctttttagtgtgagtgcctcttgccctcacatggagtcctccccctgtgctgctgccatcgccaccaagggcctcccagggtttagaagcaaagtgaccctgctcttgtagccttgcagcccaggccatctgcatctagttcagggggagatttttcagggtctctctatgcagacccagtccatcgcccaatctgagggctgtaggtctttagacgagggaacagggctgcatcttctcagggatcctctaccctgagttcatactgaatcgacagtggggagccccagcatgggaaggaagctcaggccactttctttcctgttgcagtagatgccagcccagactcatcctttgtcggcggcgtgtcttgtctacctggctgatgctcattctttgggattcttcactctcctctgaactgcactcgcttcctccccctacccattgccatcggcggtgaccttggcatgtctgccaacactcaacattgccaggctttataaacctcatatctcagaaaggggctgacattacattacaagaggatctgcaaacctcccgggatgactgatgtcttttttaaacaacacaccaagacttcatttaaattagtaacatggagattagaggcgctctcccagcccctggctcggccacactgaggagctggggatatcagtcacatgaaggctgttaagtttgaggtggaaatgaatcagagagcctgtaaaaactgtcagcgggtcagggaagtttatgaactcttgctgtatctaatcataaatcatcagaataagctaaaactgagaagaaaaatgtcctcttttgtaatctaatgctgtctgttagggcaataaaactcaaatgaaatgcgcgcattgcaatttttagctgatactttacattattagcaaagaggctccaagttaaaagagtgagacggatgaggggaaggctgccatccttctgtggctctagccgtgaacccgagggcattgtggcttttttctcctcttccacctccttgggactcaaaaccacaaactaggtgacacggatgtctgggccatgggcactagttggcagggtcactacctgtccagtgatagccttgaaatgcatcacatggccgagggtctgctcccagccagagtcaccccccactgcctttgttcacctaagacctggccccacacattcggtctctggagggtggaagtgtgtgctgcccatgctcaggactccaagttctgccatgcccattagcctgggtccattacttgatcccctcagccctctaggagtgactcagtcctaagataggcttcttggatgctcctgtgctcctggaaaccttcaacagccaggtacctgggctgcctcttctcccatggtttgtgatacttgagacaaaggctcgaacgatgtctttctgttctactggccctgcccaggcacagacacagcccttgcaggcacaggggctttgtgatgggaaggatgactcacctagacctactgagctccagacacctactgtgtcctagaggccccaaggacaggagtccaccctccatagaggtgaaagtggagagggaggtggtatccttaggttcctaccctaaacagccaagctggtgtcagtctcttgcagcttcaccttcaacttcctgcatacaggggcagaatagaggatggaaacagtgtatggcaagaagtgagggatgctgggagataccgtcaagagggtgggagctagggcggtccagtcggtagagtgatggatgtacaagagtaaggtcttgactttgactcctgccctcaaagcacccacaggaggaaaccaggcacagtgggcacatccttgtcagcctgatgttttgaaggtagaggggggtagatccccggggccttcctagctagccagccttgtctaactcattccctgttccaacgagagatcctgtttgttttgtttttgtttttctcaacaacaacaaggtaagtagctagagagatggttccacaattaagagcactaactgcttttccagaggacctacgttcaattccctagcacctacgtggcagctcacaactgtttataactccagttctggaggaattgtgtacatatgtgtagtacataggctcacacaaccatgcgcagacatacacacaaaaataaaaataaataattaaaaacaaaaaccttaacaaacaacaccagcagcagcaaagctctaaggtggatcaatcctgaggaatcacagacaagttgacctgtggtctccacagggttacacaaacatgcaggcctgtcatctccccacatgcaaccacatgcatgagaacacacacagacacacagaagcacagcaacaacaacacaaactagctaacaaaaaagatgaagggctggcaggaagccatcatccatgcctacagaaattgtgtaagagaaataatagtcctaacccaatactatggctatgatcagcctggagtagatggtaagtgattagtgaatgaattaagtggagttgcagcaaagcattgagacaccaattggctacagggttgtccttcctgttctttgaattatgtagacttgaattatgtaaagcagtggttctcaacctgtgggccacgccccctttggagtcgaatggtcacctaagaccatcagaaaacacagacatttgcattacaattcataacagtagcaaaattacagttatgaagcagtaacaagaaatcattttatggttgtgggtcaccacaacatgaagatccgggtgaagggtcacagcattaggaaggttgagaaccactagatcagaggagaccctatccctgaagatcataccagaaatattagaattcattcatgtggaagagatagccttgggccaggatagctgatgtcaggaagtcttttaaagccttctctgtcaccaccgcccactcagacaacccgaagagaaggaagacctcaagtagatggcgtcttggcctgtacctgctaaggaaagagcttggagtgggtttgttgctcacagctctgcagccttggaggtggaagataatgaaataacaaatttggtgtttgttcttacatgtggccccatctctgtgctcttatgtcaatgaagtgatgattcaattctttcatggctatttcatgtggacactgatcttttcactgggatagagttctcatgatgtaatcatctccctgggctccatttactcacagtctaacactgggcattaatttatcacccaggaatctggggagggcactagcattgccaccatagaaatggtagcagctcccatgtacgtgttcaaccctgcagcatctcactgagctctcaacaccagtggaaaaatagcaaggagtgaggactgtccctctgtgagaggcatgtcatctttccttggtacagtggtaagcttggtgggtggtcctatcttctcccaagctgagtgacaaagatgagccttgtgaagagtgaatatctggaaataggattccaaaagtgaacagaagtgaagggagacttggaggaggcagatttcttacagatattgacagtgtgaatgtaaaatgtaaaatgtgcccatttgcataccacatacccatgcctttgcacacttggtcttcagcagctggtgtttagaaagctgtagagcccttaggagccgaggcctaacccaaggaaaatgtgggctggggaggtggtccttgagggttgctcctctcctgcagctcagcctctcctgcagctcagcctctcctgcagagacaaaatatacctttcctttaaagtgctcctgctcggttatttttgtcaccgtgacaagggaagtgactgatacctgaatctaccaggaaccccaggaagtggctgtggagaaacctccctgtcttggcctcccacagcagagaagagcaaggcccggtgaaggttaaggcctccagcatgctcttccccttgtaaataaagagtttgacaagcaaatgtgatttggggtgatcagtggtcttgaggaggcctgggaccactcagtcacactcatcctcacttgcttaaatctaggtgtttttttttcaggtttcacatgaatcacaagagaaactcccaaaggaagttggcctgtttgagtgcatctccacttcctgttaacttccatgtgttcattttagtttagctaccgagagagcagttgttggccagcaacatgacccttctcttgactttgtaaatagggaaacagaaactctgatttaaaactgctcatcagtcatgtaactgcctaaatcagggtctctactcccagaccattgcgtttaccacacattttacagcccattagccttccgagatgccacatgtgagtcgtagaggaccaaacaattattgtaaacaagaatgggagctggccttgctgtccagaggctcaggacataaggggggtggaagatgggaagaaatgtagaatttacatgtgtgtgtttgtcttgaccttattatgaggtgtctgtgtgtgtatgtacacgtgtgtgtatgttggtatgtgtgcatgtacacatgtgcgagtatgtatatgtgtatgtgtatatatatatgtgtgtgtgtgtatgtagctatgtatgtgtgtttatgtatgtatgcatacatgtatgtatacatgtgtatgtatgtgtgtgtatatacttatgcgtatgtacatatgggtgtgtgtatatgtatgcatatatgtgtgtgtgtatacatgtgtgagtatgtatatgtgtatatacatatttatgtatgtatgaatgtgtgtatgtatgtgctgtgtgtatatgtatgtgtgaatgcatatttgtatgtatttgtatgtatgtatgtatgtacatgtgtatgtgtatatatgtatgtttgtgtgtgtgtgtgtgtgtgtgtgttagatcaggaagtggagaggatcaatatatgtttgggtgaggaatgaaagaaacttcagccctgtgttttatttcctggggttgctgcccctcaggggtatggatagcatgagagtaagcgtacagctgcgaatagagaggccccacaggaaaaatcctcttaggaggagaagaggccagcgatggcggtagatgccctcagagaggtagcggggacagtgtctgaggatgcagggatgggggattcagacaggaaagtcaacatgggagagctgcatttctgggaagtaggcaggagctttgagggcggtgtcctgagaatggaacccacaggtgagaaggtggaggagcaggggtggcagaggagaccccagctctggtgcaattctagttgatacctgacctgtcccatacagcccaccccacctcccctcagagtcacttcttgtatgttcagggagcagctcctcctgattccagggacccctcctcctgaggataacttggaagaagagagtcagtcagtttcaagcagcagctcctgcccttgccaaccttgccagctctatcccagttttcctctccgttggccgatggtctcatctgtcttctgctggcttgaccccagctgacattactgagagatgagtctcaaagccttcctcagatgacagctgctctacttactgtttaactgttaaaactgtgcaagaaagggccacgagaagtccaagcatgtcacctgggtgccggcataaccctctctgcctatattctgcaacaacagacaacagcgcatgaggctcagggcatcatcccggctgaaggtgccgggtactttccccaaagcctcaattccatttccccagagccagcaaataaaggtctccttataactgtgtttctgccccatgtttcccacatgcctgcgggaccaccctaggcaacgcatctccttccaccagggcattgccactttcctcagtcaaccaagaagatcctcaaatcaccactgctgtctggtgtcagcagttatctgcattttgcccatcaccagggataggatcctgcttccagcggagtggaaaaccagctgcaaaatgacttcttatgtcaacagtgccactcaggaccctcgctaaatgtagggggggggggtcaaccagacagcgcttttgggggcaacacctatgaaagaagtgtaggtagagggaggagtcaggctaggcagagacaggattgagggcttagctgaagcaacagaaggcagcagactaggtttaccctcagcatctgtgagttgaggaaacaagacagggccagggtgcctgcccgtggacatggtggagctctttggctgagaaagtctccagtagggcctgagagcttttgtaactctatcccctccatgcactggggtcttattctctgttgtcaacaggaggccagaatagagccttttagcacccactgcatgactgatttccatggcttaaaataatcaaagatgaggtggaatcgatagatttgctatacgaaagcctggtgacttctgagttactgagctgaagagagcaacaagagtgcagaagcagagagtaagttaaggttgcaggttactttttttttttcttttgtcaaaggtatggttgaaattcaggaagaaatcaaaagcaaaccaaaggcatgaggattcagagacaaacgctggtaggatgcgtgtgtccagtattttattttgattataccgttgtgataattagaagcttttatttggcattgtgggtttaaatttaaaatctgaactgacagattaaaaacacaaggtgtatgtattaatgtgacacatggcacggttatgcagtgttcaatcagattaaagcttcaaactcctcagtcatttatcacttcttctttatagtggaaagagtcatagtcagtgcacagtcaccattggtggtcactctactgtgtgattgaaaatgcaccttcaactcaatcctgtctaaccccagctcagtactactgacaagcctctccccttccttctttttcccttcctcccttcttttcttccaatcttccttcctcctttccccccctctccctccctccatcccttccttccttcaggatctcagctacctttccaataccgtgtctgccagcacactaccatgctccctgcgatgtccataccatgcggatcgtgataaacacagaaacctggacaggtctttgtttttgtcgtctgtaaggctgtactgtctcatctgttttagatgttggatcacctgggacactgtttcagggggtctcgcttcatcaaaccatattagtctggaaggaatccataactttcttcattttctgtagaaacacaggcaaaaactcttttctcaagtaacctgtccttatatttaaatttagaagtcaaagcattttcagaatatttaagttggattaattcagcagcattgataaccaaatgtctgttagcagttgttgctccttcctcagcaatcaaacaatttaaagaaacagtgtaacatatattatccagattctctgtgtattttcaatatttttgtggctttttcattagtctacttcttttacttttatgttttccttttatgagacagggtttctctgtataacttcggctgtctttgaattcactctgtacaccaggctggccttgaagtcacagatctgcctgcctctgcctccggagtgctgagattaaaggcgtgtgccaccacactgagctcagcttctctcttcttcttcttcttcttcttcttcttcttcttcttcttcttcttcttcttcttcttcttcttcttctttttccttcttcttcttcctctgtttttttaaacactttatcttgtttccttttctctcacaaacctatgtatattttttaacacactgttaacctttagaggtttttcttcatctgaatctgtctttactgtaaatctttacctttttctggccattcagtcttttatctgctagacaatactgccaaaattaaagccatggctgttttagacgctgtctttccaagatggcaggagtacgtttaccgccagcactgagagctgtactcactgccttggtctatgttgccatcaagcaacacgctgccggcttggagagccagctgctcgtgcacaccattgaattgttagcaagaaccctgcagttttatctgcttatgctgagttaggaagcctctcttaaaggagctgctctgcttgtctctagcaaaacagagcccacccgagaagatgctgctaccaagaagtcatgcttgtctctgttcttttgcttctaaaatccttttttaagcttttgtgaggtttttatgtggaagttcgtaaaaccacgtcctgacaccatttttaaatatgtcaagtccttctgtgtatgtttatcttatcagttgttgaataaagcactgttggccaatagggaagcaagataggtgggactaggagttggggaggattctgggaaatgtagtaaagagaagtcttgtgatccaggcaggaagtgtcatagtaggcagtctcagaatataagcagggacaagcaggatatcgctctctttctcttcctctcttctctgtggggttgccatgtgatactgggaagagaatgcatgaagctggcatcctccataaatatttataaaatatatagattaatagtcatgattgataattaagactgagctagcaagtaagaaatcctagtcattggccagcagcattgtacctaatataagtctctgtgtgttattttgggtgcccacattgcggctcaggtggctggtggaaagatttatcattatcgacatctgatgttgccctctgggttctatgtatccatactcacatgtgaccttcacatgtctgcacacataccaacatgcacacataaacataagagtgaacaaaggtgataaacagaaacctgaaatggtgtgagtctggcacaggaggaaatgataatgggaaatgtagcaagactgcatacttgatcagaagaaactgaccaggcaataatccaaggtgcaagcacggtagacagaggcattggcaaggcattggggccgaggtggactcggcttacagtccctcaaacaggagggaggcctttatggaagaagaataaggaagaacatgatggagttggagaagcaggcaggtcatactcagagcaactgggaccaggctgtgggaactagaattcgatgttaagaaaattggttaagtccctggaaggttttggctagggagactggtggtgaggtagagacatggtgcctcagggcactgtgacaggactgcattgcctttggttgcagtagggctcctctgtgcagcatccgctatgcttcctcatagttggttttggaagcatctgcaggtgtctcagtagccatgagctgtggagttacaccagcagctggggtgcagttcccatattgttagtggctgctgagtctccatgagctgtgtgagggctgggccaccccagtaggaccaggaataggtcgcagctgtgtgagacctggtttgagagggtctcacacagtctgggtactttctgggacgatgcctggtgaaatggaaatgaaaatccctaaactgagttcaggtctatgggcctcagaagagaaaaatgcttggttgtctacctgggtggggctgccggctttccctctaatgcacagtctgtcttcttggctgatattaagatgggacactgggtgatgtgtgttagttccattcttcatgaggccattgtgtctctgccccacggcttctcagcctcccctactgtgctcagacactccagaaaagcagacttgccctgaccttgctttgctcctttcatgctcctctcatcagccaccctgatcagaaattttcaccaatatttgaccttaatcattgaaaatttggcattcaaatagagacggattgtgtgcctgatctcaaaatcttagcatgaaggggatcaaatatctcctttataagtctacattgattacatagtgggaggccagtgttttggagacagtcgttaaaattaatctcaccattacttttcaagttgtgatgactagaaatgttctcatccccatgagactgccatttgatttttatctgacagtgttgttcttgagagtcaaggcaaggagctcctgcagcttctgcactgacaatttagaattgagtgttaatcaagactcataacaatagaaatatctattaattacttcctacaatgcaattagataacatttccctaacacacaggctggatgctgttctaagtacaagccttgtgtgcaaacatatgtacttggttctgaaggcaatatgttaaagcgtgatgatggtcaccgaatggatttcctattcctggtgggacgtaatagacagagaaagtgtcaaggtgggaggcacaaggatggtgggaaagatgacgaagtgaagcccatcccactcagaagcacagcaagggttatacttttgagaggttatactttttcctcagcactggggattgaaactagggtcttgtggtatgacaatgctgtgccaccaagctatctctctcttaaaaaaactttagattttgagacatggtcatgctaagctgcctaggctggcctcaaactctccatagcctaggcaaaccttggacttgccatcacattgcctcaggcttccaagcagctgggcctgaagcttgtaccctcagccaggccagactgcggagatggttgtttgctgaagaaaatatctataaagcagctcccttagatctcagggactggagtgaggctgaaacagaagcagcacgggtcagcctagagtgctgtgtttttatttcccatctgaagctgtgagaagaaaaatttcctgtttattaaaagacaggtggattctgctctggggctgcaaggacgcccacagacagccaccccagcctcttcctctgtgctgactttgaaggcatcgctccagtattatctgagatgaacacagcaacaccagacccagactcaagttcacgggtcaaaaaacttcttttcctttcctgctaaaacttccacatccatccattgtagcccagggtgactgacccacactgggttaatgacagcgacttcctcttgcaccctccaaaacatagtccacgcttgcactccagtcccggcagagcccggagcagaggaagaggtgatgaagcagcctctggtccatttctcctcattgttgtgtcaagaggacgtgacaacggtgcttcctccgcagagggcaagcaggagaaagagaggagcacacaggcacacaggtgtccccttcctgcccacggatggccggacacaggccattcatcctcttactctcttcagctgctttcagaagccgctggctctgtcctggagccccactcatcctccgtgcagccaccacagtctcttcagacccctcagaagctgagccaacagcatcacttggggaatccgagtgaagccaacggtgaaccaagcgctgacattggcatgaactgcagggaattcccgatgctcagccatttttaattcaccaaaatgatattggagattgtgggtgcagcccaggggtaagcccttgcctcacttgtgcctatttctgggtttgagccctagccctggagagtcggttattgcatagattataaccagtgatcacaggtgtgcaccaccatcccagctccctgtccattgagtgtttggcaagttgagcattgtgctgagagaggagatggcacagtgtggctgttatgtagttgaacatggagatgtctatctagtgaagcaattagagagtctccccttgcataattaaaatctgctcacatcctgtccgacggctgatgtggctgtgagggagccacacggggatgaggcgggcagagcgctccgagagccgtctaggccagggtcagaactcacagcctggtcggacccagagcccaccgtgatgagaatggatgccctgtgctggctactgtgttctcctctgtatttagacgtgtaaacgcttctgttagtctcttcatctttactcttcccccccccattgttcttggattttaaaaacacgtgtccccttgggcgtttaaacacttagtctccagctggtgacgccgtttggtctgttggtgtagccttattggaggaagtatgtcactaggggcaggtttcaaggctaaaaaccctcacctacttccaggtcactgtctctgcttcatgtttgtggttggaagaggtgacttgtcagcctcctgttctcgctagcacgcctgccacttgtcatcgtgaccgccaccagggactcttacccacttgaactgtaaggcgatacgagctctctgctttccttaagttgcctttggttctggacttttatcacaacaacagaaaagtaatgggggaaaggaaatccgtctgctcgcctgcctgctgtagcgtcttcttgctggccccgctgctgcccctgccgtcgtttgccgacagactccagctttcccagccttccagtgtgcgttaaggtccagaggctccccaggaatccttgtatccatgagcaccagatggatgtagtggaggcatctggcttctttggggacagggttattgggtctcagcctctttagtatgccattgttggactacccaactccacagtgtaggccattccagtaagactctcttatagcatctacacatatctgatctgtttcccgagagacctgaataggactctcagtaccctcagaatagggctcctgggtctcttgcagctgggtctgctaaatgcagagaagccccgagctctgttggaaggactcatttctccgctgtcagtcaggaaggctattcacagaacagtgtaagagatgagaagtgcggaccagggtcaggagagtgaggcagctagggtgcagggccagagggacactggtctactctgagaatgagtgactcttaataaaacttgtgtatgtattcatgcattcacacatacccccccaacacacatacaggaacacacttgtacaaaaacctcataggaaaatgaccatgtgaggaggctcctccttgcccttcatagcaacagataacctcatagccaactttgtgtgccccctagaaatctcaaggcacagaggatgccccacatgaaagagggtgatgtactagttactttcctagtggtggtgatcaaatacatagcagaagaaacttgaggggggaatattttggctcacagtttcagaggatacagtccatcatgctactagaggcaaggtagctggagcaggctagtcagtgtcagccaggagctcacaagagctggccacatggtggtggcataaaggaagcagagaaatcaggtaggctccagtggcagacaccacctccaaggcccaaccaagcaacccagctaggtttcatgtctcaaggtttacacaacctcaccagatagcaccaccaatgggcaacaagtgacagacaggtgaggctaggggaatatttcagtcagggctgctggtggcaagttctggtttctttaaagggtaagcaatctttgtatgttagtttctcttctcgtccttttcatggcggtgaccaaacgcctaataaaaagcagcttatgggggaagggttgattttggctcctggttagacaaggtggtaggctctgtcactgtagggaagtgctagtggtgtccctggcagtggaagctgtggctgagatacttcacatctcagaagaccaagatgtaagaaagaattgtattggtggcatcatctttctcccattctatctattctggaacctcagcacattgggatggcactgcacacactcaggcagggtttcctcatgcagttaactgtctctggaaaaccccccacagaatcactgggatgtgtgcctgatgaatgccctaggtatttaaaaaataaaagcatgtacttatcactttatgtgtatgtatgtagtgtgaatttatgtatgcacaccatgtgtgtgaagtacccaagatggcccaaagagggcactggattcccctggagctggagttatgtgggtgctgggaaccaaaccaggatccattggaagagcagcaagggcctgagccaccaagccattgctccagtccctccctaggtttttgttaatccaatcaaactgacagctgaaacaaaagttgttgacaaagaaggcttctctttgcaaaaccactcaacccttccacacatgggccattttttattactaaaataatttttatataattttgattgcactcttatttacacatccatcccccattccctcgacctcccatcctcccatactccccaccaacccccaacccatctcccaacccctccccagggatagtgaggccctccaggggggactgtcaaagtccatcacatcatttgggggagggcccaggccctccttgctgtatctgggctgcagtagtatccctccatagggaatgggctcccaaagtccatttgtgctctagggttaaagactggctccactgttagaggtcccatagactgtcttggcctcccagctggcacccacattcagagggcttggttcggtccaatgctggttccccagatttacaactagggtctccatactaggtcaggtcaactgtttctgtgggtttctgcagcaccatcttggctcctttgctcatccctcctccctctccgcaactggattacaggagtatggctcagcgtttagctgtgggtgcctgcttctgcttcaatcagctactggataaaggctctaggaatggtaaccaaggtagtcatcaatctcatcataggggaagggcatcaaaggcagcctcttcaccactgcctagattcttagttggagtcatccctgtggatcccctaacacttcctctgtggcagacctctctccaaacctgggccatttttttttaactcacctccccagggcatccaatgacaacgaagtttaaatccaagccctactactgattatctagggagatttggaacaagtggctctctgactttgtaggccagttttctaagtcataaaatacatgcattgggcttagtgatcttcaacgtccccactcaacttgaccaatctaaggaaaaattaaaaatgaaaaaattagaaaaaataaaaacatcggaactgtcctgcaagggaaaataatctggggatacaatattttgacccttcaaaggacactgctttttttcagttaagatttggtagtgtttgagatgattctgtgccccgtgtggcatttgacagtaggtggacagctgggctgtgaggctatcccgttgctgttttgcatattggcagtcactggcagagtttgttacaaacagctctgctctatttagggagctggtgatcaataaggcagataatattttcatcatatttaagagaccaatgctgtgaaggctgattgtcaggagcttctgttttcttagcagctttgcaatttcctgtagtctcctgcacaggctcttcgtcttactgggtcctttgctctgtcccaagcaccagaagattaatcaccagccgtttgttagtgctgggaaaaaaatttcgtttctggtaggatgaggcaagacacacatgcatgcatacacagagagagagagagagagagagagagagagagagagagagagagagagagagaggggagagggagggaaggagagagagaaagaataatggggaattttctttttttctgtatttccaaacagtggaaaaacaatgcaatgtttgccttaaattttgtgtctctggccagagcgatgagagaatttcttgaaggcaaaaatctgtcttttgtcttattgttgccatcttctgtcacagggaaatctgctcaggctggcagcttcatggtatccttttttttttctcctcaaatttgtcacttgtcccagttgtgaagcgtcttgattcaaacatgggttgaggagcatctacaatcaaagcagccgtgactcaggaggttcctttggtcattccatctgtgacatttttaccccaggctgaggtggtgggaaaaccaagtcagaaagatttttttcactcctcttgattctttcttttgtcttttcttctctacaaagtgtcgagtaacaaggaaaggtgtccacatagggacatggtacggcaagagctttcccctgcttgaactctctttgagaacattgaaaccatccctaagttctcctccttccagatcccaaccagcagcatacagcactctcacttgagactctcacaggagtgtgcatctccacaaaatattccgtccctaatggagcagtctccgatgccacacgaagtacatatagctacccagttatgtttgataagcagacatctgaaggtacgagggagtcagagttttggcttggattttttcattttaatatttactgtgggatgggggtctcagagttgagcagtgtctccagttattagcagtataatgaagtgtgtgttcatgggcctctgtagcctttatatatcactgtattttttaaatgtgtgtgagagttttgtatatgtgtgcacggtgtacatggctccttcggtggaggtcagaaaagggcatgagatcctctggagctggagttacagatagttgtgagctaccatgtgggtgtcaggagcaaaacctgagtcttccataagagcagcaagatctctaaactgctgaaccatttctctggtccccatagcaatttttaaatatggctttaatgtttaacttttttttttttcttagaccaagtcctgctttgcagcccagactgaacttgaactctctgtcctcaggcatttgtgtttggagtgcactcatgatggtttctagctgtcatgcctgctctgttttgggttttagatgttcccccaaaggctctgagttaaagattttgtctccagcttgtagaattttagtgaagtgagggaacctttaggaggcagaaccaagggtaaggaatttaagtcactaggaccacacctttacatgagacaacgtggctctggactctgcctgtctcctctccttcttggccacagtaaaatggcttgatttactctcccacctgcttcctaccatggcgctataggctcagcagaggcagaacccgctgaccacagactggacccccgaaatcatggtcccaggtcaccttctctccagacaatgataggaggaggagttatatggccccaaatgtcagtcggttttgtacaaaagcctaaggactgatgctaccccaggctgccggtggggcgggggcgacaaggtaggggtgttgtctgtgaggcatccaggtgaagctctgcttcccaagatggaaggaagtgacggtgcagtaacaaaatggggccagatttggggttctcagaagcaagtgagacattccaaagcatatttcttcctccttcctttgtgtgtgtgtgtgtgtgtgtgtgtgtgtgtgtgtgtgtgtgtgtgtgcttgtatgtggctatgtaggcatgtgtgtgtgtaagccagaagttaacttctggtgtcaggtattgtaggagctgtccatcatgtttgtttttgaggcagagtcttgctctagccaacagcccaccagtagcctaagcgggaacaccagtgagcctgggcatcttcctcgtgtccatctcagcaggcctgagattgaaaagcgtgcaatttcacactcaggtattgtattttttatttgagtttttttagggggactggagctggggtcctcctgcttgaaaagcaagctcttcaaccagttatctgtatcctcagccctgttgtctttcttttctccctggtccttgatttatttatttatgtatttatttatttatttatttttctgagacagggtcttgtgcatcccaggctggccttgaacttactacacagctgaggatgactctggactttgatcccccgcctccacctcttgcctcctcctcttgaatgctgggattataggcgtgcaccaccacactgggttcacacatattttctttctttaaaacaaaattctaaatcagtcacgatgaatgaaatctgagacaatggctcctatttgcttttatttgaatatgtttatgtgtcgttaaaagaaaatcttcaagatacacaagcaggtgtcagatagtcaaggcccgaggatggccacatgttccggtgcctgcctttgtaaacctcagaaactgatgaggacagttctgatgagggcaggagcttctgaaccaggagagggctgagccctgggatgggaacacatgattttcagggtcaggcagccattcgaatgacagcagtaagtggttggctggaggctggctcaggagacaactgaatttggaagagagataggatcgctcagaggctggctcaggagtggctggttggggagtctttaaagtaggaaactggggtggaggagaggacaggacagaggctctgggacactgggactgtgacagctacatccagaacctcacatggctcgcagagggtgagattcttcctataggaacttaataattgatgactgaatgttctcagaaccccaccctccatgacagagtgtctttctctgtggattcttttggttgagttgagtgactacatctgtttaattacatatgcagttccaagaataagtccaacgcctacaaatcaaacgtatgggcttcattttgttctctctctttcctccctccctccctccttccctccctccctccctcccactaagtctctaaactcaatgagagaatgatgttttgcagtcttcttggaggctcctctgtgtctcagaagaggccatcatagacttgatttttcaatttatcttctccagtcagtcatgacctgagatgaagaatagggtctctagaaggcagagacagatgaaggtctcagctgcaaataagagatgccaagtatagagttacgaagggattttcttgtgaatttctctagtcccctgtatgcttggagtccggggaccattttgcagaattccctaaatgggacacctcagggagatcaggtcacgtggcatgttagtgtgagcgagcttaccaacactggtgtagtgtggagtgatggtgtgttttgtggagtttaaggagtctccagagatgtgtggggtgttagcagagctttctagctagcagtagtaacagtgaacttgacagatgcctgtgatttgcatagcacagccaggaagacttaccttgttagacagcacacccaccaagggcagaggttatgtgttttttattttaatcgctctctctctctctctctctctctctctctctctctctctctctctctctctctcggacagggtctcatatgtagtcctgattgtcctggaactcactctgtagaccaggctggccttgaactcacagagatactcctgcctctgtcgccctggagctgggattaaaagtgcgctaccacacttggatccggtgttatttgtttccactttaacgagcaatcaagtccatcagacacagctagaccagagtcacacagtggaacgaaggtcagggttcagagacggggctgctggccacagaccccacacccggtgaccctcagcagacactggcccgccccagctgcagaggtgcagttaatgcacctaggggagccatggcgagggtgacaacagtggggtgctaggctgcagccctgttgcttcccgcatttcaggaaggccttggtggtatcacttacatagccctacttcctagttgctcacttttcgaaagtgcagagaaaatcaatcaactgatctgggagacaagaagcccttatgcattgagaaaagctattaacccgacggcttttatttttttcttcccccttaaggagatccaggcaatactttctgctgtagtttagaaaatttggaaaatatatagagagaataattaaagtcagctgtatgctgtccaattagatatctgggtctatttccttggtcctttccctgtccctcgttatggtttctaactgtgtgcatcaaatagttgctttattttccaaattagcttgcaaccagttgttctaacccgatgctctaaggaggtttccctcttgagtttttcatgcggctcggtattccccggtgcataccaccatgatttatttactgaccgcccccaccccctggacattaaagtggcctgtgatgttccctggttataaatacactgcttcctctcagctggtccctctctctgatgccagcctgctcttgtatgtgtgtttctaccttgctctttgtcatcagctccccgccctgtgccccatttctgagaactatctctgcttggtttcctgctaaaggcttcagttccttccagggactagagtcctgtctttgaaatcactctctccttagctgactcgcctgttgatagacctgtcaggaaggctgtgtgctcccaaccctgtcaggaaggctgtgtgtgcttccaaccctgtcaggaaggctgtgggtgctcccagctctgtcaggaaggctatgggtgctcccaaccctgtcaggaaggctgtaggtgctcctagctctggcctgctacctgccctaggcttaggaagaccaaagatgagaagaaagatgtgaggggcgggtcttggagaagaagaacacacaagtgtaaacatgagtgggtctgagtacagccaaggcagaaagggtggctcgctaagcaagaccaagaaggaagcctagattagaacttactattgtccaacttgtcctgtgttctttcatgttttggacctgcttgctctccccacccctgcctcttagttatcaatgccttgtcatcttaccagtctttgtttccatcagagctagttgtccatgtgtctctggcagatgctggtgtggccatgtgacattcaaaggcttgaactagggagtctctgtgagcttgggatggtgtgggcactctgggcagtcagcctgcatatcaccttctacctgcatatcaccctcctgttgagtcaactataaaccccagcaggtagggaacggggcatgttatcttgtttatctacagtgacactgggcacataggtggtattggtggggagtcgctcctggagttctgagatgggcccactgacacctcagtcttttgtcctgtgccaggcaggttggagcatttgcaagcaagatggctgaagtgcaaggtttggggggggggcaaggatggggcttaggcttcctaggctccgatgggtgatgggagggggataatgaaggttatagcagaggacacaggcaagggaagggagcaccagctgctgagaaggatgtggccgattacagaatgaggctgagggggtgtaaagtgtgataagaaaagcccaaggagaggataaaaagaggtttgcaccagaggtcaaggcagataatgagaaacactccctgcacgagaggaatgcttgccaaaggaagaaggtggcggcacccctcccaagacagaacagaggcgatttattgatggacaccggggttgaaaattaaatgcttggtatgttcacaaaaagagggcagagggcaggccccgcaaagacacagcacatttcccaagggacagaaactatcacaaaaggtgcgaggggcatgtggagaagaaaaaagcatcttattttcatagctgggcacctggccttccaggagggacctccattgcctcagccaatctcttgccactggcattgcccaagctgccaactgtctggtgcccgcatctctacatggggacatagtttgtcacattctgtttctgggtctgaggcaaactactcccaacaggcccatttgccaagtgagggcctgggtgagaaagctgagcattgtaagttttgctgggtgcctccctcactgaagtctgtcaggaactgtttcccagcaaaggaggcataggggaaacacaaacaacactgctctgagggcgtgcagacaggggaatcattgtctcctgttgtgccagcatggttcaaagcagacagccaagtttgagagaatatggctggagctcaggtcagggacactgagaagggccagggtcaggggcccctggaggtctcaaactgtcatgtctgacacccactgcgtttccgttgttggagagggtgctaaattctgtacttctgaaaaagaaagttgtgtgggggtgggggtggagggaggcagtgggagcagggtctcgtgtatcctagcctgggcctaattattgccgatgaggataaccttgcaggtcagattaccctgcttcagccagtccagagcaatcatgattccgggtgtccaccgctattgctgtcttgtgtagtgctggggattgaacccaggacctcatgcatgcttggcagtcacttccctactgacctatctccataacctaagaaaatgaaaatttctctggctgatagagaccagagctgatgctcatggccacactaggcattgcgatggataccttccctgtcatctcatttaaaactcacaagacagtgatgatagagggcacaatggcctcccttccacatggggaacctgaaggcagaatccatctggcccatgggtttacaaagcttggttcttggccaccaagcaaagccaaggtcgtctgttcggctctgagagttttcctgtttcctgaccgcacagtgcgtgtgctgggtgaagccatacaaagggtgtggtgtgctcttctctgcaccttctgctcaaggaacttactggaaagccaaaacggactcggaaggaaagagccaaattcgggaagtaaacacagtccagcaagagttcggcagtgtggctgccacatggagaatgactcagatatagaaggaaaagggagtgtgagtcgtatatttatatagttaaggtttaaaaaaatgatttggaagtttagagtaatctttgcttggcaggtaagaaacaaaagcccaggatgttacatttctaggttttatttgcagagactggtctctggggatttaaattccagtatctgtgactagtttgcagtatcttggaactcttagcctcctgcaaaaggtgtaaaccaggaggctagtgaagcccctcccccgcccaccccaacctagacttgggccactttggagaaaaccaggtagagagcacatagcaggaccctactctgtcacttgaagagtttatgaaatgacaatgatgataaacacaaagctgggggctttcatgctctctctccctgtagcagtgtctagcaggtgtgtccgcttgccgtcgtgacatgatatcacctgcaagcttcaccctccacagccatgcaaccaagttgataaaagacaaataaaacagcatttcaggtaagtttatgttttttgtgtgtaaggcagtatctgtagctatcttggggttcatgtggcccaccagctgcaggctggatacctccaggactctaacaagctggggtctgactgtgcagttgtgctggtctgtgcctgcctggtttgtttctcattggagaaagacggcatgtctgctgacttatcttctagcttcagttttctggtctgtaggtctctgttctaccccaattatagagaaaaaccccatcattgcaggaaaacgtctcatgatttagtctcctgtgttcctgtcactatacctatccttacaccacgaggatccttgtatgtatacatagacagacaaacccatgggcaaacttcatttacatccccagtagcagactcctcttggttgaccctcctgtctggggcattgtggtcctgcatctctaagcatctttggaagtgaggagagactgtgcatccctggaaacaggctaaaggccactggggcccccaggaattctaggtcctagatactagggtatgtacaaagaaagctaagaattctggctcttccccttggtcttagagtctgtggaagtcagcaggaagaggcacctctcattcccagggaggctccctcagggcagtagagatgcaaagaaaaccaggagggacatctgtgagtagatctttctagtcatgtttctctggacaagcatatatgtatatatgtgcttgcacataggttcagtctctctctctctctctctctctctctctctctctctctctctctctctctctctctctctcacacacacacacacacacacacacacacacacacactcttgtaccacaaataagattgttctgtgcatggtattttgtcactttctttaaaaaccaagatatattgtgaatacgttctcaggctaacgaatactcattgaacatgaccaccaaagctagattttatagggtgtgtgttagtaagatttcatgtctcatcagccatgccttattttaactttaaattaataattatttatttatttgttatatattgttagtgtatacgcgtgcgcgcacgtgcgtgtgccaccgtgcatgtgtaaaggtcagaggacatctttttctccttccaccgtgggttccaggctttcacaaccagcaccttcacccactgagccatctcgctggccccataacttattttaaatcacacttttgttcacactgggcatttctctgtttgtgccgttgctcatgggataatcagaaaatcactttgttgttgttgagccacagtaaagttctaaacatctacaaaacaactatgcttttgtatgtggtgtttggactcctccatcctctgcctgtttagtgaaaaccattccaaagacaggggacatgatggctaattagtggtagtgactgaccaatggctggtgaaaagctgcagactcccactgctagtgaagacctgctcttctgctccagagctctgagacagaggccccaaagggcagttggtggggggatgttgtgtctgcttacatggctgaggaggagacgtgcggaagtcctggccagcagggatgcaagatccacacccccccaagaggaaacacagtctgctcatttcctgacccctagccatcttagggcttcctataggatgactcagcctttctccctcaggaaattataatatggcttgtgaccttgaagtttcttcctatgtgaatggtgattatttctgaagcacactccacaggactgtgattgccccagggttttcctcctggatagcaggaaaacaatatatcaccaaccacatgttcaggtagagaaacaacactctcacaggcagggccagtgggccacacttgtttgtggaaggatccaacaggtcaagttaactcagagtcacccgcttggggaagcagaagcagctgagatcctttcctgttcttgagcccatctgttggggttcaccaacatggtgacacccaaatgtgtgaagcacttcctgtctgtgataaatatcttctgggtgagtctgtgggggccgacaccgtggatgtttacataatgtcttgtgtgtgtcacatgtgatttgaagccttgatccccaacaacacttcaagctggagactcatcagccgtgatgacagcgaggccagatggggagtttcttctccacttcctttcctgccgtgcagaagttgttccacgtgcacagcctttgggtcctcttcatgccctcactgctctaagagggtggggacaacccacttgcttgggaaatctggcagctgtcccttcatcctcctttggacccagctgccctggtgctgtgactttcatgggatgggtgctatgtgtgctcctcacgtttgtcttcaagtccctgatgcatcccggagacttcagtgaaaggtgggaattcacagccagagccaccaagcttggatcctgctacactgttgagcatcactccagtgaaatacaagagtgtaggagggaaagaggccaatgacgtctaagattcacaggtccccacctccctcctggggaactccagcatcagagggacagggcaagaagaatcctgtgaagaacaaggacagagcccagacagatggaccagaccttagatgggtggaggatgagaagacactgtccctagcatgttgttggctaatccagagaacctgtaggtctatggtgccaagtgtggcccatggccagaagcattggtagcagctgagaactttcaaaaaagttgaaattcttgggtttctcccatgagacctagtgaatcccagtctatttcaactggagcctgcctacctgtgtataatgattccttcttgggagctacactagccccatgtgcagcccaagcctgcatatgggatgagtaagaacccccatagcagacagttggtcaactactgtggccacttccaatgtcaagatgcctttggcaagttgaattaaagacccgcaggcagttaatgttgagaagagctaagggcataagacggggaaacccaagataaaactctattgctagagaacttccataattcactttggaaccttcattggtaatgtggctggaccagtagtttccatatgcagctcaagcatgacgtataaaggacaaatcatgatatgctctataatctcagcactctggagagtgacacaggaggattgccatgaatccaagggtagactggcctacatagaaagacccaggagggcgggggggggcagctcaaaaagtaatcaagaaactctaaatgaaatttctagagaggctataatgtgcttcagggctgtggagattgagctcaggccaatactatctgatttcaggaaaattcagtctcttccaagcaattatatagctgtactagaaatccaaactctttggatccaggcatggctctccatccgagactgccttacatgaccatgtgggttttaaggaggcagtaggagggccttaccatatgacaaacacaggaactacttagccaaagaccccttaagcttctattgtagcgagtgtggacaaggcggcttctcccttcttatgctgtcttccaaatggaagccactgtgatgaggtcttggggtggccaactgctttcccccttgatgtcttctgctgttgccctggctgctcatgtcatcaataattatagcgtacttcctcccagccaggttgggtagaattcttaagacgtcagcacatcttcaaggctgagtcactgttgggaatggagaaacagtgaaccatgtaaaaagaattgatatccttgtgaatgtgtgtgcatgtgtgtatgtacatctgtgtgagtatgtctgtgtgtgtgtgtctgtgtgtgtatacacttgtgtatataggtgcatttatgaatatgtttgtgtacacatgtggaggtcacaggacagcatctggtgccattcttcaggcacctacctatttttgagatagggtctctcattcacttggaacctgaccaaaccagcttatctgtgaggacccaggagtctgcccatttgtctgtcactgggattacacaacactgcatttagctttttacttggatcttcatgctagaaccatgtccccatctcacagagtaacttcagagatcatcctcaaggaccaaaactgtaccactgtgtcactgtcctgggtctcagccccaggaggatggtgtttgccagtccttgtccttgagaaggtagcctttactgccctgtcctagtgtggctcaggtgtgtgttaagaccaggttaggatgcaggtaagagaagggtggagccttaaagggtgataccacttgccaccaaagatgaactggaacaaaacataacctttttttaaaggccaagaagaacatagttgtcattaggtcctggccacttgtcacctgcattatctctggtctttgaacagatagaattattggcagtggctgtgctgcaatcaaaagacatttgctgggctcccttttcttgacataaagatctcccagtgaacaacttagaggcaagggacctcttcttatgcacaagcatttggggtgaaactacaagccacagagccctgcagtctgcccaaggggtagagccgggccatgaggagctcaagcaggcaagaaacagtccagcttgcctccttcccttcttgtaccttaggaaggaggagattttttcttcatttcttggtctcccttgtccttgtccccttgtccctctgccttgtttgtagtgggcattttcatttgaaaaggactatgagaaggctgactggttttaaagaagagtcacactgcctcataagtccagaccctgagacagggtgcaaggcttggttctttcaagtcttgaaacctttgggattgtcatacacagcagggaatgcattttgaatctggtgtgtgtgtgtgtgtttgtgtgtgtgtggtgttgtattttgttttgttcctacctatttcactatgacagtttttagttgtgacctgtaaatgaatgtgatgtcttgctcattgtgtcacggcctacatcagattgtggtttgagtacttctgcctgggagatgggtcccctgcagctctctctgagatagccaggggagtgggaggtagcctagcgggtaggggctggcaccgcagacagcccaggaggctgcttcaaggctgccgagccagcagcacatggaaggaacagtacagggctcttgcgttggccagtcctcactctgtggataaacagaagacaccagccttcggtgcctgcaatctgctacctccccagagtgttccaacccagccagagtgtggaaggaaggaccgactggagagaagggatttgtgttgacctccatgcctcgagttcatgagtcaaaggcttcttttgctgcatgaatgctcactgatagcaatacgtcctgcagaaggatcaggatggagggaccaatggtttggtggcacacagcccccggtggctttcttccctttctgatgcctccctccatcaccgcatgttctgcggaacacgccatctgggggctttggtgcaggaaatggctgggactctgaaagccagctgagcctctgctaagccaatgtgtccctgcgagagtacactgagtccagggaggcatccgggctgcctccattggaaatggctctgccagtctccatggggacttaaggcagccagctctctgcaaagggtggtagcagagggaggcgtggcctctggctagcagtttctgggagatagataggtaaaatgaattctgaaacaaagcaaaaaaaaaaaaaaaaaaaaaaaactggctagcaggttccctgaccaccttagttctatgcctgagaaaggtgacacctctcaggaaacaggtatttgtatcaccctttggtgtcattgtgccctctcctcctgcagcctcaggctgggaaagcagtgctcagagtgcaaggcgtggccccagcttctaaggagcttgcaatccaatcaggaaggggacaaataatagaaggctgataatgcatattgcatgagaaaatgaaaataaaaatggtgggaagtggggtagcaggcaagagactcggggcttcttgtgggtgggagagaacttggagaccctgtggtggtgtggtcggtgccaggcagaagatgaagagagatcacgttggaggagaagccctcagaggttcttggtgtctaactgattaaacaccaagaattcagaggccacaagcttaacctacaggtggtatagatggccactcaagggttgcacagagcacaaagtggacacccactggggaaaagggtgagtggggacctgtggcagagaagacgccgtacaatcttctcctgggtttgagataaacttccgtggattctggctgtggacagtcgctcacccacacaggcctatgctctctttacccctccctccctccctgtagatcacctgtcacacactcatcatcctccgcccctcagtacacgttgtcacttcatctctgtctctgttctgtcccctgtccccttatgcaaagtgacgggccagtagagctcaccctacttctgggtttccctagggggttcccatgggaccactgtgtggtagttgtctggcatcaccccctgtggtgaaggtaggggtgtctccacgtttggtgggaacacgaagcacatctacccagcaccagcactgagccccacgtatatcaatgggttggcattggttgcatgtgtgcaacaggcattgaggaccctggaggaggagatgaaaagaggaatatagatctcaacgctatagatgggatctgagttctctctcaaataccatgcactagtggtttggtggccagcctgtagaactgttggaagacactggaacatttaaaggaagccaaacctttgggggagttttaggtcagtgggggcatattcttgcaggggatactgggaccccggatccttcctgtccccctttatttttgattcctggccatcactagttaaaagacgtcttctaccattcactcctggagcagtgtgtcaggtcaccacaagcccaaagcaaggggacacagtgcccttacttagaaccctttgaagcctacataaatctttcttcctcctaaattgccttaactattttgtcatagcaacagaaagctgaccaacacactggtattagcctaattttgaaacatataaagcactttctccatgctcagaatcttgctacctgtgtgcttgtgggcccaaacagtctgattccatgcttagcagtgtacccctatcaagcagttacgtactggaagctgggtatgtgtgtgagttatgaaaatagacagggtagtgtagataattgttgacaagatttttgtcttcagtttttaagggaactgtgtaggagaattttcatgtttctccttactccctccccagggacactgggtgatacccagtgtcctcacttcccaggctcccgctgaaggacggttgggctcaccaggacaaagacactatgctgtgttaacaccagagatggaggcagagagagccccaaggaatgagatgttgttctggcccagggtcttcattagagagtagttgacagaaggtcttcttagggtgacagatgtgaggcgggctgggaactaggggattgctctctgcatccttgtttctttggggaattggttcttccttgtgatttattttcccactttgaaatatttcattcattcaccccacaactcatccatgccattttatcaacatgccactatgaaaaactgggccaactattttttttttccctttaacactgaaaagaaaaagtttctcaattcagtggtaccaggtaatttttccctctaaaaagtgatttcttattggaaatgaaattttaaaacaaactggaggatgggggaaaagtaagttgtttggtgacccctgtggaaattacgtttagtcagcagcgtaagtgacatctaagaatcatgggtattctcccctatgtctctaccaaggaggagaccatgtgtgtgaaacttgcacatgtactgagtacacaggagggattttcaggtgtaaaatgtgaagagcccatgctcagggtcagacagctgagttcatctcctaaatttgcaacttactggttgtgtactgattagcatattatttgttcccgaagtgaaaggcaacatgtgacaattggtttttatccatgtaaccgcatagaatcatctggaaatcgagtctctagtgagtaattgtctttatcagggtgaccttcgggcatacctgtgtaggattgtctcagttgttgattgaggtaagctcactgtggaggcgctattccctagacaggtggttctgaggcttcaagccaacacacagcatccccatggttcctgaggcacttctttgactgtgtgtgagtttctcggttagagatcacgctgtgtggatagcaagcaggcttgccttcaagtccctaccttcgagttcttgccatgagtttagtacttagctgtgacctggcattataaaccccttcccctcaaggttgtttttggatggggtgtttatcacaacaatgggaatgaaactgaaacatcccacatttagacaggcattcttcaagtttgtcacacagtgacagcttatgggaaccatagttaatgtgcaaagataacacaatgtggtcaatgtggtattatcatggttttcttgttgttttctgtcttggaatgactcatatgccctttctgcaaacttgatgatatttcacttgggatgatctcagaaatgaacttgtggccaagactactgatgttagtgaaaggtgaggccgaggagtgcaagtgtgcagaggaagttctgtagtgttctggggtggagcagtcttgggtgagttcacgtctgttcaaataagacacatcactaactgcacactagtggtgcaagccatcaatctcaatggttaccttgccagaggaggagtgacatggggacagtggaaatgagacatgatggtaggctagagtgaggcctgtcaacctataggaagatgctcttgaccagcaatgacagaaagcaaatggcttaaacaatgaagagatgtgtttgctgtaggtgacaaccgttggttttaattattgactcgacataagctggagtcatccggaaagagactctcagtaagggattgtctgaattgggttggcttgtgggcatgtctgtgggggatggtcttaattacattaattgatgcgggaaggtacagcccagtgtgggcggcaccattccctagtcaggagtcctagactgtgtaaggagatatcaagctggacgcaagcaagtgatgtgctcatgttcacgcccctcagcgcttgactgtgggtgtgatgtgactagctgtttaaaattcttgccttgacctccctgcagagatggactgactggaattgacacttgaaataaccccaccgtcccttaaattgatttctgtcaaggcattttatcatggcaacagggatgagacaagaacactgttcgagaaggaagtcatagtgtggtaacccccagagctggttctctcatgaagcaagcactcaggttcttctcagtaactcactctgccatccttcctcacactatggtccagatcccccacccccacccccccagccccgccaccaacaacaacaacaagaagggagctctggcatcacacaaaagtctacaagacttgtgttttctcttacacatctcaagaaaaactggtaaatttccaggatcaagaaagtgaaagttagccttcaggcatacagcaggggactctgtaaccacatttaatgaacttagcctgttccagacctgccgaaagggaagtggcctaggtgaaccgcctgtagcttggcattcaagaaagcatcaaagtaaaaagcatggacaagaagcagccgggtcaaatgatttgaaaactggtggcaggataggacgtagcaagaaaagcacacgggcagagggcagagagatgtggtgtctaactgtgtctaaccgtgagctcagttgcacattcttagatataggctccagcattgtaagatatttagaagacgccatctaaccagcatcgccagtgcagggaagtctctgaagactgagaatgcctgctgtgtccccagcactggagatcgtcctctgctggtttctacagatcattccctgtgtgtagagctgtgttttgtcatacccctggtatggttttgctctcaacttggttgcatagttctgctatgggaaagcaaaacctttagaaagtgggacctagtgaaaggaagtctggaaattttgtgccgtgggaagcggggaccttgctccctcctggctttccttgttgcttcttggccattatgggatgagcagattttctgttccatgcactcacaccactgtataccaccttgctgcagacctggagcagtgtggccaggtgaccataggtcagagcacccgaaactgtgggcccatggcactgttcctttacattgggtatttttgtcacaaaacagcaagctggatgccgccatgttccaatggtgtggtgtcagggattgggacaggctctgtaggcaattcttttgttccatctttatctgctgggtcacttgatgttctctgtggtccaacatgatgcaagtcacacacccagagccctggtggaggaactagaaggaaaaccctgcttgggctgtttgttcctcttcttcccctgtgctctctgggcctctccttgtggttttctcaaatgggatggtcagcctacctgactcagacagaagctgcttgtactttgagcaatcaggaccagaatggacagcttgagtttctccctgactctgttagagctgttatgggccggtactgaatcaagaggaggtatggtgagacactaaaattcccagcagtcagtatgagggatgacaaagggttgactgctgatcttctttcactcagtcactcaggaagagagtgttagatgagaattggagacttgagagacacccagcttctcccaggtcagtgctccgtgaaagaagtctaggctagtctctggtctggcaccaggagtcacacttgcccaccaagctgttagtgcttctcacagaggacccatcagaactaggtagagggctggacagatggtcagtgagcaaagtgtctgtcttggaagcacgaggacccaagtttgatctccggaatccacgtgaaaaagctgggcatgattacacatgcttttagccacagtgctagggaggcacagacagtaggttcttgggattcactcatcagactaaaggagttttccagttctaggtcactgagagaccctgctccctgaccccagaaatggggagatgacttagctggtaaaaccttctccacacaaactggatttctagaacccacggagatgatgggtaggcatgatacctgtctgtaattccaggtctgagtggagaccagggggagctctgggtttagttcagaaaccacacctcaatgaataaagtggaaatcaattaaagaagactctggacatcagctgctggcatccaaatgcatgcactgaggtgagcacctgctctctctctctctctctctctctctctctctctctctctcacacacacacacacacacacacactctcacacacacacactctctcacacatacacacactcacacatacactctcacacacacatactctcacacacacactcacacacacatactctcacacacacacacactcacacacatactctcacacacatatacactctcacacacacactctttcactcactctctctcacacacaccctcacatacacacatacactctctcacacatatactcatacacacatacactctctctcacacacacacgtacatactctcacacacaaacacactaagtattgcacacaggtgcaccaacacataaacagagtctgaggaatgacattcaagtttgttctctatgcacatacatgcatgggaacatatacccacctgcacacacacgaacacatacatacatcatacatgcatactgaactactttaagagatgattcctatacattaagccaccagggagagccctttggacttcctgttgacaagtctgttctccgctgtgcctcctcacacttctgcttgagccagagccccgagtttggaaagagctttggatttctctgctttgtgcccagtgagcacccccggctggtgtggaaggtccagaggcaaattaaatgcacttgaaataatgagaggacagggctctgcctccgctgcccccaccactcgctgggttgtgggaggattatttactgtgtttgccttgactcgagctatttaatttttccaaaacagattcagagaattgattaatggcattcctcactaaaagtcagaaatgtcagcaagacgtgtagaagctggtgtcattttggactagagcaatagatacagctgagaaacagtgacctgcaccgagcattcttgaggctaggggctcatgccacttttttgctaggagacgaatatatataaggccgtgagaaacagagtttgggtggttgtggctgactgggtattgtgctaataataggaggaaatcacatggcactcaagtcacctccagagaggcttgggggtgaggtgaatgcgagtgcctggaattaaggacatttcttcaaatattcccccatgtacgaaaatagactgaaggaaataaacgtgggacggagagaatcgtgaggataggatgacctctgttctgagggctgtggtgacgggcaaggggagagttaacagcagaacaaatggcgggatatggggcccacaccacaacagctgatcctccaaaacttggggggggccttctgagcacaggactctgggagagctcactggtcgggtacccaggaagtttgccctgggcaggagaccctggtcctttctttctttctttctttctttctttctttctttctttctttctttctttctttctttctttctctctttctctccctttctttctctctctctctctctctctctctctctctctctctctctcctctttccctccctccctcccttccgtttttcttcatgtactttattgttcatcacttggcttatttgcatgcaaacagagtctgtgactcctctgtaatgatttgagaatcttatatatgtgtataatagattttgatcaaattcaacctccattctcccctccaactcctactctctactttgccccctccccccctcctcccaacttcatgtgctctgattttacacttgctgagtctgtttcctgctgcctgtctgtgcacgggtagagggccatctactgtagcatggctgtctctcaggaaccacattcctgaagaaaaccaatctccccaccccaagcatctgtctcagttagggtttctattactgtgctgaaacaccatgactgaaggaacctggggagggaagggtttatgtcactcacagttccatgtaacagttcatcatcaaaagcagtgagtgcaggaactcaagcaggacaggaacctggaggcaggagctgatgcagaggccatagggggagctgctcactggcttgctcagcctgctttcttatagaagccaggacaccagcccagggatggccccacacacgatgggctgggccctctctaatcaatcactaattaagaaaataccatagaagcatgcctacagccctatctcaggggaacatttaaaaaaaaaaaaaaaaaaactgtggttccctcttctcgaatgacttttgcttgtgtcaaattggcacaaaacgacccagcacagtagctatccattgccagtagccccttggctagggatgggacttcataagccccaactctaactaagtcacagcaacttcgagttcatgtgtgcaatgaccctgtcacatcaggcaaatactatttctctgtgttttttttacaggctggggtctgacaatgagctatagggccatcatgtccttatgcttaggtgggtggggaagaggggctttccattttgtgtgtgtgtgtgtgtgtatgtgtgtgtgtgcgcacacacacacacacatgtaccaaggtcataggacactgggcatctgccttgatcactctctgccttattcccctgagccagggctgtgcgtagattcttgggattggaatcagggtctccctcttacacagcctcctttttcagtacccagtgtcctggctccctggccctctccaccttctcccttcagataacctgacctgaaagatgaggaccttgacaaggtccagctgcctgaggtgtgagttgtcagtggtagacagcatcttccctgtgtttgtctttttacagctcaagactcaggatgcatggggcaggttccaggccccatggagctcctagagagtcttgacgtcactgtgtacatcttcactcgttttgcctgtggtcctctgcccttagtgacttgtatccccagggtgaaggcacagctctgaatggagcagaactggccccatctcctgtcagagagacaaaatatctccctgtaaaatatccacaggaagtatctacagatctaactccattttggtggcacatggggcctcttgatcccctgctcgtcatagccctccatcctactctcagccacttcagagtacatagctcaccagtcaatcgtccttgaataccaaaggaagcgccccctagaggtggctacacaggtgtctttggtataacatcccccaggtcaccaacaagcacttaagctagagggggtcttgttgctacaaaggacagggctggactgtcgcctctggacctcccaaagcaggtcttgcttctttctctggggcctgctgtgtttgctcacccttcctcaggcttcatgtcactgaaaccgccttctatgcccacagaccactaaggccctcactgttcagattgatttggcttctaggaagtggttgtggtctacaaagccaccacatgagcccagaagcaaatggtttcagccgtgcaaggccaggcagcagttgggcctcagagaggaggttaataatagggcctgtccttcaggcagcctgggaaagcctttggaatttcctgtcttcagttacgcctccatcgatctgttcacaagtatttgactctccagcaggccccttctctgtggcaaccttgctctagaaggaaagcaattgctgctttggttttgaaagctcagccatgactgttggagagtttgaagccaaaacatattgagcaaatgaaaacctctcactccctgggaatcactcttcattttcaaacacatcaatcggtctgtcaacagcacggatggtgggtctatgttgtagagaactatggatagggcactgggggggtgtgctggacccggtattaatagttccattcatctgtgctttttctagacatttaactcaactgagtgaatttagtcatatcggaaagacccactgattctgacgaggtactgaactagccctcgagggaggccaaatatagaaagagaagtagccacatatagaaagtcacagtctcctaagttcttgggacatagtcatgcacataaatagattagcccaggcataatgtgataaacacagtaagaagaggtgacctcaggaactccaaggatttagaaaagacagaattacttggcatagttccttactcaaaactcagaattgggcacaccaagtattcaataagcacattttgaaaactgtccaaacaatatgcctagacacaggcctggaaaaccagggcagcggcaatgtggacactggttcctgcagcccaggaggccaggagttcataccattgtcaccatgaataagcgacagagaaaaccagtgtgaggcatggaagatttgttttggctcatagttttagaggctttagtccatcgtggcagaaggacatggtatcatggcaactgtaataaggggtgaggacggtgagtgggggagggaagggggagggggaggggaagggagaggggggagaaaggtctaaataggcagggtttccccttccccttttgctccacccacgctccagcctttgagatggtgcagcatggtgcagccatcctcagttaaccctctctgcaagtgccctcacagacacacccacagtgtagtttacaaccttagaaggtctcaatccaacccagttgacaatcaaaatcaatgatcacagacctgcagagatggctaagggcacctggctgctctcccagaggacccaggttagagtcccagcatcaacatgtggcttgtgagcatctgtaactttagtccaggcgattcaacaccctcttctggcctccgtgagcaccgcacacacgtggtctatgtacatagatacagcaaaacatcagtacacaaaaaataataaaaatgttcaaaaaagataacccaccgcaggcagcaagctgttttgtttattcgtgtgtcattttttcattagtacatccatctgtctgtctgtcaatccattcaagatgtctccctccctccatccattcaagatgtcatatttgacaatgcaagacaaagccaaggggataatcgacagtgtgaaagcaatgaataaaagcttgagaatatctggaagctgagaagtggtgttggggtgagggtccacagaacagggggtcacaattcgctggagactctgacagatgagaaaggatatcagggcagaaccaaaaccacaggtcaagggtcagagacaggacagacaaattggttaataggtgcaagcatcttagatgtggccactgcacctttgttatcaagtaaggagatgggcatggaggtcctgccctagtattcaggagcccaggactccggcaacacagtgagtactgtgggttatacaatgtgacgggtgaggcaagaaaccaaaagaaacatgaaatgtcctttatcctaacagagctgataaccgaggggaatagcgaagaaacaataaagccggggcaagggcacaatggataaaaaaatgtgcaagcatttcaaagtcccagtatccataaaacactggcatgactgtcagggcctgtaacccagagtgcagacaggaggatcacggtagcttgctggcccgagattcagtgagaggtcctgcctcaagagaatagggtggagtattagcaggacacctgtcctccacataaacatgggcacacgcccctatacaccccacacacacactcaaagtaagaaagggagcggggtggggtcaggcagtggtgcacacctttaatcccagcacttgggaggcagaggcaggcggatctctgtaagttcaaggccagcttggtctacagagggagtttcaggacagccagggcttaaaacctgtccttaaaaaaaaacaaaaacaaaccaaaaaaaagaaggaaagaaaaggaagaaagaaagaaagagagaaagaaagaaggaaagaaaagaaaagaaaggaaaaaggaaggaaagcaattagcagaatatttatttaagatgaaaataagttgtgaaaactggaaaggctgagttgaggtgcaggcacacctcataaacattgaagtagtcaaaggtatctgtggaaagttcgctcgaggaggcaggttttgcaccacccttccaagtggccctccacagactgtagaggcaggagttgtggtttgaacaggaagcatctcccaccagttcacaagtctcagcacccagctagtggtggtggtttgtaaggttgaggaacctttaaatgaaaaggatatggctcactggggttggacctacttcctgtccctcccaggaccatggctggggaccctacaagtgtcaggcagacccagctctctggtttctgttgctttgttcccaatcatccatctctgtggggcctgatgctgcccctgggtgatggatggcaggtttctcagtcatccacagtctttttctcagtcctgatgcatcttggtctgtgggtacataacaagattgtgaggattccatggctggtgccacaggagaacattgcctatagtgctggaggtgaggtagtcctaggtcaaagtgctggtgagatcagtgtctggtcagggccccttcctggttcaaagaaacctgtctcacatggcagagaggacaggagcttcaggagtctgtcttaatgacctatcaaaatgtttctgaacatatgaatggtgtggggacataagcactcactgtgaagcctacagtgtgctccctcttccaaaaggtaatttttatcctgcaaataatgcactaataatgctttaaagtgaaaaggcgattaaaatgacagctgtctcgacgcttgctaccccgtcttcagaatgacagccccgatgttttgtgtctcctttaggcttttaatttacactttggtgtctgtttattaagtcctcctgcatttgtaagaggtgagatgcggatgctgcttaggtgtggtttgtttgtggtttgctgtgtgggaggttcgtcctcaacaaggtggcatgactttcaagagctgggattattagagggtctgaggtcactggagcactgccctggagggactaaaggggttctctggggtttgttgtcacagtcctgagttgtcagagcaagcccagccctggatagattcctggcttcctggcttgtcatgtgatcacctatctttgtgatgtcattctccaggcatcaccgtctgccctgagatgatgttggcagcatgccatcaaacctccagaactgtgagctaaatagaactctcatttataaatgacctcaggtattgcactattgcaaaggcaaaccaactgtaatacatgctacatacactaaatggccttttgctcctttttttctgcttaaaaagatgtctggaatctcactccatgccatgacaaatccatttctcctgttcttaagcaaaggattgcattcctgagtgtagatatacattctactgttgtagatgtatgatgggctctgagcaatttccactttttgtggttataagtaatcagaatgaatatatttggaagaaaaatcttctgggacatgtggatgaattctttacacacactaattataatgatggggtcataatgtatatttaatatcttaatgggtaaatcatgtttaaatggcttatctatgtctcccatgagtaattgtttagtatagccttttcttcacactcttatattggtaaaggtcaattatcatagttatcaatatttcagaaatatatacatttttaaaactgctgatttttgctaagctggtgaatatgaaaaccagatcacactgtctctcttttatttaaaaattagtttgggaaatggtctattttttcatactcaactttttttgtgaagatttatttatctatttatttatttatttattcagtttacaatactgctgaccaattgactagggtttcttacttgctagctcagtcttaagtatcaaccataaagacttaccttataggacgccagctgcagtcatcttctcttgccaggatcacagagagcaggaggaagagcaagagcaagagaagacgatttcctgtttgtccttgcttatatatgagtctgcctgctatgtcacttcctgcctggatctcaagacttctttttactacatttctcagaatcctccttgactcctagtcctgcctaacttgcttcttcattggccaacagtgctttattcaacaaccaataggataaacacacgcagaagcactttccccatcatctcctcttttctgtctaaacaaaaagaagggtaacttgtcttttataataactgaagaaaactataaccataactatctgtcttcaactccatcaaagaccacagaaggataatatataaactctagaattgacagagacatctgctacctggacagtcacccaaagttcctctgtaacgttggagcatccatcttcagcccataggccacagtgtctggcagacttctcagtgaaacaggaacccttcagtactgtcttgttttgtaagctcagcagtcactttcttgtgggtcctgcatgtccagtttatacagcaacaaacagtccaggcaagagcagtttcttgcccaaatggctaatcttgccatgttgaaggcaaactccataacgagtttctttggtgcccatccgcctttctgacgtaattggtgtgtcaggagcagttgtgtctcactgtcaataaaaaccctaaaccatttaaatgccatattctgtaggtctttgaaaggtttgaagaatatttatccatctcaaatacatctctgtatatctagaaaacctaactaacctaactgtaggttgtgactattataggtgactatataatccgtatttaattatgcattacattttaaaagatctgtataaatacaatacctaaacaagaggagacatatacatgtcacaaaattgaccttaataaatattgtatcaataaatgaaaatccataccaatgcaaggcattcgttcatatatactattccccctttttcctttaaaaatagattgactatgctcattactatttataactaaccccatttaaagggggtcttgcttgatcaaaccatattagtctggaaggaatccatagctttccattttctgtggaaacataggtaaaaactttttttcccaagtagcctgtccttagacttaaattttgaagtcaatttaaatgtttaaatgtataagttggattaatttagcagcattgataatcaaatgtattgtagcagcagtaactccttcctcagccatcaaacaatttaaagacaacaatatagcgtatagtatccagactctctgtgtgtttttcatctttaggtggccttttcattactctatttcttttacttttattttttccttttatgagacagggttcctctgtgaaaatttggctgcccttgaattcactctgtacgccaggctggccttgaagtcacagaaatctgcctgcctctgcctcccaagtgctgggattaaaggcgtgcgccaccacacccagctactctatttcctcctgtttatttttctctcacaagcccacatacatttttaaacacactgttaacctttagaggtttttctttatctgaatctgtctttattgtaaatctttaactttttgtggctacacggtcttttaactgttaaacaacaccgccaaaattaaagtgatggctttcttagctgctgtctttccaagacggtagagttatgtttaccatcagctctgagagctgtgctcactgccttggtctatggtgctaccaaggagcaggctgctggcttggagatgtggtcactgccactgccaactgcgtggggcatgaaccgatgaccctgagattaagagtctcatgctctaccaactgagctagccaggcctcttaaaaagagccctgtggtttcttccacttatgctgagtcaggaaacctctcctaagggaaccacttgggtctctgcttgtctctagcaaaacagagaccacccgagaaaatgctgctacaaagaagtcgtgcttgtctctgttcttttgctgctaaaatccctttgtaagcttttgtgaagtttacatataagttcataacactaccgccagctgcccgggttctgctgatgcttgactagttgcaggaaggcagcttgtggcgactggcaacccatggcttgtggtgactggcggcttgtggcggcaggttcccctcttcctctgggaacctcagagcatggggtcatcccactcactgacaccattctgtaaggataagtctttactccatctgccggagccctgctgccacgtgggcacccagaataacacacagagtcttatattagtttacaatgctgctggccaattgactaggatctgtaggggaagctgtagccacgcctacttcggggctggctacaggtgtgcctgaccatgcttgtgaaggtgtggtcagagtgagtagtgtgactgcgtttgcgctttcggtttcactttgctgcttgctgtacagaccgctaccatgccggctggctaggttgctctgtaagtaaggcttttccctattaagtatccttatatttctacctgactccgtattggtaatttcccactataaggatcccttacttgctagctcagtcttaagtatcaaccataaagacttatctttttggatgccagctgcaggcgtcttctcttgccaggatcacatggggactcagagcagatagctggaggatgagcaagagcaagagagtgatttatttattttatttatatatgtgtttgcctgcatgtatgtctgtggaccacatgcatgcttggtgtgtgtggaggccagaagagggcaccagatacctggaacaggcagttgaaatgcagtgaaggtgctgggaactgaacccagatcctctgcaagagcagaaagtgctcctaaccaccaagccatccctctaatggttagagattaaagtgtaacctctggtataaaaatctgtttttaaaattatcattcagtgaagttggtttctgttatccatctggggacagcacgaagaagatgccactctttgctggagaggctgtgtcatttctcagtcctccctagaatgtagaagagttctgtcattctgtgttcacaacagccagcatttgctaacgccaccatctttattgtttgcctgtttgctttaagctgttctaatagatgatatctcacagtgcttttgctccttggtagtgagtgacgttgaccttttttatttatggacctggatcttccgcaatggcacacctccccacctccacccccccatttgtgtggtttgtgtttccttcataggttatgggttaaccctcatgctggagttatgtccaaatctgggaagctgggttcctgaagctctctgcatgacttgcctatggcacagcagatcctagggctactcctgcatggctgcttaatgcttctagaaccttttggagaagagtttctgctctctaggacttgttcacttcttgagactcatggaggaggaaatgcgtcaattcagaggaaaacactacaggacaatgcccgcaaagtaccgatcatttgaatttcctttggaagaaagaaacttccttctgtggctgtcattactcagccatcattcccaaagaatattttgagtataaatcaaattccaggtcaatgattcttttattaaattcctttaaaactgtcgtgtacctcctcctggcagctgtgactctggagaaggaatgtgaggtgactcaaagggtttctctttaggtgaggttctgtgttcgccatcttcacccttttggagagatgttcagtgactttgtgcctgtgcacatttctttgacttactagggtactctaggctacttgaaactatatgtttttgtctttttccaaaattagaattttcctggttttgaaagatcagcactttctttgctcctcccagcatctggccttctgtggaggcctttcatgggagttcccgagactttctctaccttttctcctttccagggctttaacatttccactgttcacactagaacacatctacttatctgtctccaagtttattgacctcccgtgaccttccttaatttttatttatgttaagtttttagttctaaaatttttaatttttataccttcttattttttgactcactcattttttaaaaatattagactctttattttgctctgtcagacatttgaacgacttcatcaggcaattcaatgtcaatgtcatctcctcttggggtctattatccttccccacaggcattaagaacttaattttggagtatattctcgacattttttgaatattaaatattcagatcctggaccctacttgagtcatataggtattgttgttatttgctccatggaaagtggtggacagatacagtaacaggttcaacttgccttttgtagactgtgattgcagctccagttccattctgtcttacaatctgtgggttgacctgtcctatgtgtacgccaccaagtgaccatcctgggacccacatagaggtctcttgctagctcgtttctcagacttccatgtgcttattcaagctgtagtaaatcacacctggattacacgagagtctagagaggggttatggaatcactgtcccgggattctctccctatgtgctagcctgaagatgtttcagttttccttcgactcatctatgcagaatcatccatgtacaaatttcccatgtctggggcctagtaaaaggaagggaaagccaaagcaagcaaacaagccataaggaaaaagaaacaaatggagtttgaccccactttcatggaacccgaactacccccattcctaaaagttccttttccagatttatgactttggagtttgttttgtgactgatttggtttggggaggggctgtcaatgggtacataatgggtaccttcaatctatcagtagcaaatagtaagcagtcaagcttacgcatcttgaacctttcctctactcatgccccaatgttgacttacccattctcatgccaatacaggcatgagtagttgctgtgagtttgtgattggaatggcgatgctttgtccagaggatggcattttatagcctctttctgccccctcttcttcaatgttatctgagcttcaggggagatggtataaatgccttgtttaggatgcagcaattatcagtcacttactctgctcttcctgcacaaccttgagtctctgccttcaccaccattcactggcaagaggggcctctctgaccaagactgaaagtagcatttctgtgggcataaacataaatgtttagaaggcaggctggtgtacgtcaatttagctaaataaaagtattaagttcccttctagggcctgtcagctctactgccatgagttttgactgtcattatggtactagacatggattccctcctgtggggtagatttagaattcagagagcggttggttgcctctgtaacagtagtgtcattattgcacaagtagacaaatcttgctggtagacttcacagctgtgttgttccccctaagccacttgcgcagcaccttatatagaaggggggaagagtccagcccagcttccagtctatttctctatacagtgactatgaggtacatgatgtcttcagcaatagggtcttatcatcaagttctgtggacaaccaagaatgccaagcgcttgtattgttttagaggtttctgggggcatctttgaccagtaactcataatgataatcccactcctggcactagagtttttgtttaataatctatgacttctgggagcagcttttttctagcctggaaaagtacctcccttaaaactctttttttaaaaaaataaaaattatatttttaagttggtttctacatctgagaaatgtagaatgttttttcatattttcatgtttctaactaacacccatgtttggcagctttcaacctggaactccagttctaggaacttcaacactctagcctctgtgggtaccaacatggaatccaagaacatatcagaaaaatcatccaccatgatcaagtaggcttcatcctagggatgccaggatggttcaacatatgaaaatccgtcaatgtaatccactacatgaacaatctgaaaagaaaaagccacatgatcatctcactagatgctgtaaaaaccttcaacaaaattcaacaccccttcatgataaaggtcttggagagatcagggataacaggaacatacttaaacataataaaggcaatatacagcaagccaacagccaacattaaactaaatggagagaaactcaatgcgattcctctaatatcaggaacaagacatggtcgtccactctctccatatctcttcaatattgtatttgaagttcaattaataaattttaaaaataagtaggatgttaattgctagggaaataggctaagaattgacctattttcatgatacaggtttttacacccccccacacacacatccccttgtatcccctatactctacattctttcttcttaaaccttcccaccccccactccagcccctctattttcatattaccagcagtctaaattctatccctcctcaatggcctggcttctactgctactccaaattgaacacacaaagtcagaggtttgaagcttggatacaccttgactgcctaaggcacatgattggtctaataaagaactgaacggccaatagctaggcaggaggaaggataggcggggctggcaggtagtgagaataaataggaagagtaacctctgacaaggagagaagaaggaggagagaatgagggacatacctggggcaagaagccaggcagacatccgacagacagacacaaagaagcagtaaaattaagatatacagaagtaagaaaggttataatccatgaggcaaaaggtagattaaagggaaacaggttgatttaagttaaaagagctagccagaaacatacctaaactaggctgagcattcaaaactaataataagtctgtgtcatgatttaggagctggttgatgacccaaaagaaaaagtctggtgcatgttaatacatatgttcctaatatattatgagtgtgtatttatattgtataatatgcctctttatttctcaatgtatgttggatcatttcatatcaatagaaaaataacatttatcttcaaggctttatgtgaattcatgatattctgttgcaattgaattacaatttaatcctgtactgtgggctatttgtgtgtgtgtgtgtgtgtgtgtgtgtgtgtgtgtgtgtgtgtgtgtgtgtgtgaacaataccaccaaaaaagtggtgagctattatttcaagcatgtataaaacacataaatgatgacacataacattttagatatatacagactgaactcttaaaaatacaattgctcaaaggacataaatgtaatttaggtagatttttgtcaatttttcttttgttgaagttgtaaaaatttacactcctagagggattttgaggtcttctttttattccaaccctctccattcagctacataagattttttattttttggtgattggaccagtaaaacaaaggtagttacaacggtggttagcagaacccctgggggcagctatgggcagggtgggaagaagagagtcctgtgtacagcttgcaggaaagcaatgtaaggggatggcaggctctgcttagggacttgtttttctgtctttttgtctgtttattctgaacaaggtgactagggtgtagaagaagcttcccacgtgaggtatgactgggcataaaaggccgcacggtgttcaggctgccatggtcaaagcgtttggatctttgcacccacttcaagggctctgagtaccagggtatatttgaggcaggcaggatctgaccagaaataaaagtccttacaggtgactgattcattgataaatacaacataaaactcctgttgctcagagttgctcagccctggtgacctccagggctgttgtaagaatgacataagatgggtgtgttagtgttcaggcatctgcactggcctgtccttgggttctgacaggattccccctcagctgcagtcactaagagcaccacctgtgcacattcactgtgttcccttttaaaggggccccgccctcctctcatccttcgctctttcttcctttctctgttctctcctctccttccctctctttcctctctctccccatttcctctctcctcttttctgctcctgtctcaggagacccatctcgccccccttccccttgttatgatccctttccctaataaaaaaaacctctgcttgaaccctgtcacatggcatctttctctcaaacaccccttttcttaaattacagcagggtgtctggaccaacaagaaggttctcaaactgtattcattcctgtcatttcctgctatccttgtgcttgtctcccatcatcccttgtcctgggtaatgtctgaacttggtctgagacgtgtgttaatggtttgaagaactgctagagtacagggtgggagggggcacgggctcatggcagcagctcctctttcttaagggcttctgtgcaaagcctctgatgtaatttgttagcccacccaaccctgcagcgcagaaattgggtttctatttgatcagtttggccgggtcactgaagctgtgtgtgtaaacagcagcacgacttatccacatcaaccccctgggggtgcccagccagctgctcagcctctgccaagaagtcaggccggacttcttggtgtcagtctggggctgagactgactgatagcagtctcataggctgttcagtcatctttcagaaatggtggcatcagtagcctaagagacagaggggcagtttggctggaattttgaaaaattactgttgtgatttttgtatttagtttacctttttatgtgcaagcacagaatatcccaatgatttttgtttggtatatgcaagtgtaccatgagtgtgagagactgtcctgaagccaaaacagggtgttgagtctcttgaaaccagagttacaggcagttgttagctacctggcatgggtgctggaactctaattagggtcctctggaagagccagggctcttaaccactgagtcatcttgacagcactaagcaacccagaagttttatttgtgtggcaacctttaaaaggggaaatgccttgaagtggttatttggatgccctggtgactttggagaggtctgttgtactgtgggaagccagtatctggggccagttcagtgagccaaaaccaaataacagcaatgataatgatgatgacaatgacgatgatgatgatgaactcagtaattatcaaactgaggaaactttagaaacttctgcctatagctggggcttgactgatcaagagaggttgtgagactcaagccccacttcaaagcatgaccaggaagatgactgaaagccagagtctgggggaccacgtcccatgagaaagaatgactagtgatgtctctagggattcccaacactggaaatcccatggaatctgtctgtgctgcctcttgggtcactcactgtcagtgaaggtctgaggcagctgtagccctgaggggttgagttagaagtattgggttccatgcttggagtaccatggtgaggggcacgatgccgaccgtcccgccattcatcgtgggggacagggagcccctccccctccctggactgttccaggagatatgagtgatgccaggggaggaactggggaggggacctcagcatggggagcttgagttagttcatgtgattataaaaaaaactccccataaattctgtttacacaccctaaatatcatctctgtaactttttctcaatagtgccatacctgatgaaatacccccaaattccatttattaagctctaccctaaccatttagcagttatttagagacacatgtccgtaaattcaaaggtaatattttctgtttctttcctacataacttacatcctcatggctgtgtccacccattgagcagtgagcaacctctctaaccttagaaccaaactggaccccaccgtcctcattgcctgtttcacactgatcttcacccaggacttggttttaatcatagcattgtcaacagcctgattttgcaaagatgtaaagtcatgagaaggaatacagagccattgtgacctgcctgcctgaagctgggtgtagagttgggcaatgtgactgtgtaccctggaaagtgaaaccctcctcagagtttactgagaaagccgggtatctgggtagtcagagtgagtgcatttgtaatgggacatgcaccattgcatgcattttgttactccacgggctaaccacaacacagagcttaacaaagctggtacgttgtctctccagtcctgcctgttcatgagcaacgttatcctctatgtggtgaacaatgagccattgtcaagtttgctggtggcaatactgagactagaaagtctctcataacccctcacagctgtgactctcccccaggccacccacccagtgtttaagtgttgggagtggaccccagagggtggatgtagcctcttcctccaagcccaccttctagaacctttccatgtcctgtcacgccatggtaaccactttagccttcttctcctctgccattacatcctgcccccggcaataaccctccagaaacccttgacccatttgatgtgccttccctcaactgagttcagatgacacaaaaatcataaagggcactttgggaccaccacaggagcatgacctgggctgggcctcaggttccaggcaaagccaacctagtcaattgcacttcccttctcccacacttctctcaagcttagcaggaacttgcctcgcctaccctccgtctcctacctcacctcctaagagcctttgctgagggatcactgtggccctgggctcttgatcccaagtcttctgtagccctaggagcagcctgtggctctgctgtgctgttgactctctttcgaacgacagcttcttatatgtctactagggtcttcttatacagcttgtgcatgtcagtgtctcccacttaaaaataagttaatgaaagtcttccattggggccagggtgatggctcagcaggcaaaaaatcatgtgcctgacaatctgcatttggtctctggaacccagctggaacaccagatgtggagacgcacatctgtaatctcatcattcccgtagcgagatgggggcagagaccagagaatcagttggaagattctgagccagttagccaggagcagaacagaaacaagagaaaccttgcttcaatagggtggagagttacaacctggtcctgaaagttgtcctctgacctctgcatgagcaccgcagagcacaggtgtgtgtgtacatgcacacatgcacacgtgcaagcaaataaagaaaacattcctaagggacttctacagtgtctttcttacaacaaatagcggaccgccccagtctcatcagctgactgactgcctagagaaacaggcacactcacgtcatcctaggccctcctcagccctgcttccgtcctatgtccctccctctctccagcttcaatgtgtcaccaccaccaccaccccccccccaacacacacactgccctgcagccaaggagcctcataccatctcaggaggaccgtgcagtgtggatactgagccttagagagaaactaagcttggcctggtcttagagctgttggggtagagcagagcctactattgtactctacagtccaggaggggccccattctgtctaggtgtcccctacgttgcccgtctgtcaccccttactgctgtttacctcattagctgtcagcctttaaacccagtgtcagaagaaagcactaggtcaagccttcagaccctataagtcacagctgctgtgggccacagtgactacactcagaaaagatcacctgaccattgattctccttcttaattgaacttccattcctgttgtacctactgtgtgaacagagcagtcagaagggacatcagaaaaagcttttcagtgctgtgcatggcgccgggccgcccatctcttcttcactgtcgcacacccaggcatggctgagcagcctcctcttagctgacaccatctgctggcctctcacctttccacatctgccctcaagcccccacccccagcccatcccctgccaacagtgtctcttgccagctgaagctgcattgacagggaaggatgaggtgaaatattttggaccagccgatctgtccctccaaggaaacttggttaagtgtctcttgcctcctgagctcaggggctcatctctcctcctccccattctgtttagtttgaccttggtcactgatgacaaggcttcttttcctgccaaaccaatcaataagctaaacagacagaagatgagtatttagaatatgggcagccaaactcaaacacagataggttatcagcccagcccagagcagacttctgagcaaacatttcattagcaaatttttcatggcaacttgcatgttaaaaaaagagagagagggagagaggggaggagaagggaaataaacagtagctgggagagaaaggactgactgcaactctgaagatggaggttggatgggatcctttctgggtgggtgagctcagagaagatcctcaggaaggaaagacctggcctcttaacatttctgactccaagatgacctctcttcacttcctggtcagtgggactctgcacccagtgtctcggctgagctgggcaggctaaccaccttgctgtaccgccaccaggcagtgtggctggtgtggggatctggcctgggcccctgtgttgggtgcaaaagagcagaggggatactcacctctcactccctctcaatcccaccaaaagcccgacagagaagctgagagcaaaagtgaagtccgactgtaggagataaagcatcctactctcgcagactggccatcctcggcctctttaaatatatggtgggtgtctggaacattatgcaggataaaacttgcactcactggaaccctaaccatcagtggtggtttctgattgttgaaaatgttgaataccatatttttctcataataaccctaacggttaggtgtttggggtcacagataagaagccctaggttcagagaagtgaaatgtgtccaggcttccagggctgccagggaagcctgtgaggaggactcaggactcagcctgcctggccgcaaaggtggggaactttctgctccttggccctgcttccccaggaaatttcctcacccttaaaaagtctgtcaagctatggaattagtgatattctgttcttccaattaaatgctcagggtgggagagaacgaatacattgcctcattggctcctcttgagcctaaccctcccactggggtctgggcaggaaattctgggactcttccacatgcctttaaggcctgaactcacagatacttcccagggaagtttctagactttccctgtgctatttcataattgttctttttaattccttcccttcggtgttaagggtgaaacctaacgctttagtatgctaggaatatagaatgccttctaccagtgtagtgtgtgtgtgtgtgtgtgtgtgtgtgttgtgtgtgtgtgtgtaaatataaagaattgtgtgtattagttgaagacagggtctcactaagttgcccaagctggcctgaaactaactcaaactcatggtaattcttctgcctcgactcccaagtcaatatgtgtggccatacccagctactatttattcctattgtgatctatttttcccctagagttagttatgataattatttaattttaatttatgctaaccctcagcataaattagcactcatgctaatcttatattcctgatttataaacattggtgctaattaaatatttttgtgtataatttgttgacaatgtctggtaagtgtatcaataatgacaattctcacagcctcctccgctcactacagttgtatctgcggacacccacaaagaccttctttagtcccctcaagaaccctctgaggggtaactgctagcattcccatttcataggcaggtgactgagcactctgggtgtctggaacgtagcacttatctgtaagtatgtcctggtggaaaggctaaacaagtgaaatttcctcaggaagatgccagaaagctttacaataattgtgcaatctgttacatgtgatccactctgcatttcagaacacgtgtaactaaaaactatgggcgctttggattttctgtagttgctctcaagttcacattggcatagtataagaagaaatttgcaggctggcaagatggctaagccaaccatgttgatctgagtttgacctcagaacccatgagaagaagaaaggaaaccccacagaactgtcctcccccgaatcgtatgtacacaaaaaattaacaaatacatgttaaaagaataaatatgttctgaaggcatgggttgtcattttctcctttgttctctccttgtttgggttctccagctacagtcatgagacagtgtcctgtcttcagggccatagggtcagcatctacagtcccctggctatttattcattcactctgaggcagggatacttacggttttgttttgggcttggactctgatatttactcatactggaagggcctggattacacttgtggtttcatttattttcattgcccggtttctttaggctgatgataaatattctagtctgcactttagaagtttgtttgttttttgtttttgtttttgttttttttgtcagatttaaattacagaacagatgatgtccagaaccttaagtacctcctcttgcaggaaataatgtctcaaggcagccattgtcccagtgtcccacagtggaggccatgtctattgccaactgacttccaaagtgaggaagcctatagagttacagatgggtgaactgaggcacaaccatttccagaccacggaacacctgcctgcctcctggctgacggttgtcttcacaggtccaagctgactctaggttaagcctctgaaagctacaactgtttttctttctgtctcgtgttactcagaaacatctttcggtccttgtcagatcccacccccaccccacccctaccccccaccccacccctgccactcacccattcccatttagacagagaaagggaaacccactttgggttatcctgtgaaaatctgatgcataaccctttcttcaaggcagatgtttggaaatgctgggatttcaggcactcagcctgtcaaataccttttcaagtgatgacacaggggaacaggtagttcagaaagcaaaagcaataaactatattcctggccagtgacattgaatccccacttttttacaaaaatgaaacaaaaatccaaatccagccttaagtactggaagtatttactattttcacgaaactgtcatctcaagtgggggagagccgtggggcctctcagagctctgcagattggacgccacccccttgcccagatgtttgtggaaaaggttctgcatgcacaggggattaaaggtttatatgtaatatttctgatgaccacaggcctggctaacatgtttctgtctttgttgtctcctctgagctttcttatttctatcttcttaaagagcagccttaccgctccaaactgccagccagtgaggctccagtcatgcagatgtagcagggttctcagaagcagagatattttcaccgcggcattgacctgcttcatgcaaaagtgctttttgttcgggggtagttacagacaagtccctcaaagggtcccttcttatgggacagaatctccaatcgcccacctcttccagttttgctgagctgtgcgatttgccttccaagcccccagtagatgtggaggtgtccctgaaatctaggtgagtcaggtcagttgctcccacagccactgcgacagttccctagtataggcatcacactgggctgtgggatcctggacttgaagcattctattatctgatggcctctcttacccatggcccccttacctgtgggaagatctgaggctagattgtgtgagttggccaagtattatgtgccggacaagctatgcttcacatactagtggcagagagaaatctaaaactaggtcacctcgtggttggttacaagttgtatttataaccgagaagaaagggtctctgagatcatacgcattttctgcccgaaaacccccacttcagagggattgctccgaaacactccttagttattacactcaagataaaaaaaaaaaataccacatttctgtggaaactgaggttttgataaaaataatacagttggtcaaacccttgggatccaagttttgcattggatctgagtatgtatgggcatggcagtctttgtggtagttttagggaaacgaagactctccccccatcccagaattaaagcctctaagcctttaattccgttttcttttaaaatctgatttatcagaatcaaatcccttcctccctccctcccttgctcccttccttcatctctctcttatttgagatttggagacttgggcctggtgagaaggctcggtggttcttccaaaggcctctaggtagatttccatcacccatatcaagcggctcacaactgcccgtaaccccagctccaggggatccaacacctctggcctctatgggcacatgtgttcatacacagaaacccgcacgcagacacatgatttaaaatgtatcttaattttcttttaatttttaaaatacaaacactgacttcctgttaattatcaatcccattcttttcgagtgttgatgtttgctcctcccaaatactcctgactttacctttccaggtcactgagtggtgtgtggtcctttcctactgccctatactgctcctcaaccagctacactccctagtgaatggtgacaggagccctgtcacccactggaagactagagaggctctttgtttacttacagctccataggcccagacaggaaggaagtgaacggaacagaccctctacggagggtgaaaacactgaaatacaggctgtggatagtgccatttgctggtgtcatcatgacaagaccagccacagagagaagattgtcacagtgaacaatcctgggattccaagtaagggtccttaatgatggacttcaatccatttttacagatgtgcacatcaaggggcactctgaggagaagggaaaccgtgcagggccagggtgacgctaagtggccctggttctgggtccagagtcagatctggcagcactgttgcaggctcagctgagctggggagagcacagcagaaaggaggggttttctatctgagtttgccttgtggtgtttgtttccctgcagcatatggtcagataagacaccgggagagaggttgcttcccaccatttacaaagatcacttcctcgtaggcaggctctctgggaagaagaggtcatcttctgcttctttggaagtgtgtgagggcgccttgccacccctccacatcatgaagacacagtttgtgtctgtacaacgttagagaagcctcccgggctgaaatgcgggaagaaatgaagaccatgggtggaaatgaaaagcattcaaacacagattagcataaacccagggtcatcttgcacacagccctggcaataaaggaattcacagtgtagacgggagggtaatatgaagtaagagcgaggcactgaatgccaggtacagctgggagattacagaacaaagtacagacagtacagagaagataagggaggcaaagttagaaaatgaaaagaagattgaaccaaaggttcagataaataatggggaaatttttaagtgtgtgagccatgggtcattgaaggagacagttggatggctaagatgagggaaaggtaatttgttgaaaaaaagaggtagaggtggctaaaaaaattacaatttttatgtgtgttctggaactgtcaggaagaaggggtgggggtgggtgatgaatgtcagaaactggcatacttttcctaatgggagccaaggaactaccgaaggccaacaagcatgctgtcccaaaagacttgtagattaagatgaaaatagcggaaaacaaaacagcagggaattgtgttcaaaggcagaacatagcaaacaagtgaattgtagcaaatttaggaaaggaggatttaaatcacagaaggtctggttgcggtggggactgtagtgtggagtgggctgtggggccgtgggctgtagtgtggggtgggctgtggggggtggggaggatgggtaaaagccacggtaggtaactagtaccatctccaggagttgtggccttaggcctcctccttggcgtctttctctccttccttcctattttcttttcacatttttcctatcagaagaccgccaaccggcagaccctttgctgcttgctttgggagctatacagatgaatggaaattcaaaccaatttgaagttgtcctgaaagtggaaaaagcaaccctccctctttgaaggaagtgggtaacgggggtgcttgtcagaatagtcaagaataatgtgtctagatgttctgttttattttgattcctgtccttttttaaaaaggctgtagagaagtcaggtgtcagtgtcacaggccctggttagttatgagaagctattctgggagccccttctatcacctgtgccaagtagggtgacttctggcaaggctgcattgctcatactgaatattcattataaggtgtgacctggggggctcaatggagtcaggggccagcacagtcccatggagtgaaggttgccacctggatagatgctcaagacaactgaggtggctgaggaaggacaagggtggcgactaagattggtgaccagatcttgtgtggctgaggagagaagggctggtgatttgcttatctgattcagcacagtgacaaatttggtagccgtctggggacaggcaatccagaggcaggatagatcctccgtggtcacaggcagcgtacttgaggaggaagaatcctgtataggagccgatgacattttaatgttttgtcatcaggttatggtgcaataaaagaaatcaaatgttattgtgattgcacttgttgaggcaggggcgtgaagaagtcaggtggttggctgagatctctgatcgggaactgagaagtgtttaaccaagaacactggggaaatagcaccaagatttctttcttctcatctactattgtggctgtttccagccctatacatttgaaagcatacctccgtagtccccactgttcatctggctgataatctctgagtggtgtgtgtgtgtgtgtgtgtgtgtgtgtgtgtgtgtgtgtgtgtgtgtgtttgcgtatgtgtggacacaagtgcatccgtgagagccaaagatcaatatcggacatcttcctcaatcttatttgggggcagagcctctcactggaccactgagcttactaatttgtcaggactggctggccagccagctgcaggggtctgcctgtctctgcttccccagtgctgggatttcaggtgcctgtcgtcattcgtggctttgcacatggaagtggataacagggatgcttatcagcattgtggggttccaaacccagatccccttgtttgtgctgcaagcactggactgactgagcaacttcctcagcccctccactgatgtttgtatggagaggaaggctcagccagagtaaacttgggaaaggcaattcatgcaatctgaatctcagccctgtggttccataggctgtgctgggagccaggcgtcccttgctttagaacccttcccagtgaagaaagaggaggtacaagagggcagctagctgtctcttcctagccaactatggggttcccagggatgttctctcagaaagcaatgcaccaccacaaggtagactatgttacccctgaccaaaagaaagtggctatgacctttgaactcaaagagaaacaaataactttgttcttttcaggacttttctattaggagcttctctttgatctttgagtgttcaagttccagtcttaatgatgaagctcatggaacatttattccacatattataaacatatgtacataggccagggtgtgtatatacctgtaagtgcatatagcttccaaagtcatccaaaaagaaacacctttggatccatcaagttttaaaggcaataatgacagcaaaaggggaagtagtttactctaggccaggctatctcctccaccttgagttctcatggataaggcctccccagattgagccttcaccttatttctttaaggtcaggttgcagaggaatccagacagcagggaaatttctcgtgggaaatctgctgtctgccctccctagggtgtgtgtcttggtttccagagcaagctatctcagttgttggtgaccctacctggggtcacaggttcaatattgcccttgggctcctatctgtgactacattgagcccccggagccaccttctcttcaggaagtaaattcatcttgaaataaatgtatatgtaatgggtggggttgacattgttaacttacaaggagtgagaggggacagggatgaaagggactgaattaactgcaattatccttagaaaatgtaaaacacgtcagctctcgtgtccagaagtggaagggattggcacgacttgagttcaagtggtcccctccctgaggcccctgtgcacagcagtgcagtgtgtctccaggatgaatggagccccacactctccatttagaaggacaaagtagaaaaaacagtggcactgggctctggagatgactccatggttgagggtcactggctactcttgcagaagaccagggtttgcttcccagcacccatacggcagctcacagctacccgtaactccagttccagaggatccaacaccagggtattaggcatgcacacagtacacatgcttacacacagagacagaaactcacagtacagtaaaataaataaatcttaaagagagacaggaaggagggaagaagagagggagggcagtgagcctccatccacacttgaacccccagagcagaggtcccctgccccctggttgtctacctaagcttggaatggcatctctctgtcaggaaatgcctagtgtggttgaggccgaggtctctgaatattggttacgtttatttttgcttccagatcccagaacttctgctgcccccttttcctagcttagcaaaagagggaactgttccccagtcaggctgccctgttgaacttacaagtaagttgatgacctcatccttcctgaagccagggactctacattggttaggccacttgcttctaaaacttagcaaagtgtcaggaaagggcgactaacaagtccagtgatccctttgttcacttcgaggttggatgataaatgtacggcaagccctgggacctccgaaaagagaaatgacaccattgtcctccatgggtctcccctcttctctctgatcaaagacacagaaagggggccttctctctaggagcctgctcatctgcctctccctgcagcatatggagactttgctctgagagcctgggcggcaggtgaacagctgtcattgagcacccgttctgcagaagccgcggctgtaactctgagagcaggagcttcaagagatgcttagtacttggcagcagaagccagcagcttgctagttttccttaccccatctacccctccatttatttctcctgcttttgtctatttggggattgtgaaaactggcatttgtttacagaaatgccccttgggaacttcagctattgcaactggatgaaacggatgtcgcctagcagaacggagaggaaaatcctttatacagtttacttagatgggtcagtgttagcatgttaccagataccttaaaccatgcttgttctcagtctctgggatgccagcattccaacttctaccccaggatgtgacgggatgctgggcaaggatgtgctttcaaggctgcgtactggagttgtgagctctgattgtgaagcagggaaaagggtctagatgttcaataattgacgttggtctaataaaggaagatgcgtgtacataacaaagtatatacagttatcaaaaacagtgtggcaaatgcgtgtattcatacatacatgtacatgttatgggttataaaacagcatgtgttgtcaaatctcattttttaaaaaatgtgtaccttgtgccagcaaggtggctcagcaggtaaaggggattgctgcccagcttgatgagctgagttcaactccagaagcccacatggtagaaggagatcacttccaaaagttgtcctctgacctcctcagtcatatcacagagtgagactgtgcatacacacacacactaattgtaatacaaattataaatttaaatttaaaaatctctttatttctgtatgaagtctagagatttacataccaaaatgaagggcttagttacaggataccttaaataatccaaaatgattacctactattattagtatactaagaaaaaagtatgtacttttctttaaaaatagatgtttttttttctattttcaagattatacagggaaagaatcctggctgctagagtcagtccttggagtctaagagctgtggtcctctgacctggaagccgccggggacttcctgaactcagtttcagtttcctagtcccctgtccctgacccgacatttcggtaaatctgatgggactggctcacatcccctccgctggcacagtaaggtcagatgattgtccttagctgtaggctgcaagatgctcaccaccctccctagatggtgggcaagcaaacgctttgctgtagaaggaagcataaagaaagagagttattgcaggcttacagaagaaggagattaatgtgtaaactttcaggatggtttgggaaatgacattagacttaagggcattgaagaagtcatccagaaggcacatggaggagtcatccattccaaacagagggggcagcagtgactgaatgaccagaagtgcctacccatgacatatgaccagggatatggcactctgtgttctaactggaatctgcttctgtcccccaagtcctctgcattgtggccaggatcatgttagcaaaggcagaagagtgaccattcagggaacaggtgattggattctggcacaatggggcctacgaggcgggaaaccacatagcctgtcttggcaggtgatgctgggacttaatgacacagttggtcttgggacttaatgacaaggacccagagtgaagaggctgttctgcttggtcttgtagacataggaagacaaaggaagtgtctcaccaaaggactcagaaatatacatgtccccatttcttccctctccactgtgtgtgtgtgtgtgtgtgtgtgtgtgtgtgtgtgtgtgtgtgtgtgagtgactttccctctaatttgaaattctctctctctctctctttctctctctctctctctgtcatgggaatctgttaatgtgtatatgtgtatctctctccatcttgtgtgagtctctttctctgtctatcttaagtgaacctgtgtctgtctgtgttgtgtgactctctctctcctctctctctctctctctctctctctctctctctctctctctctgtctcgtgtgtgtgtgtgtgtgtgtgtgtgtgtgtgtgtgtgtgtttaccttatgtgagtctctctctctatatgtatgtcttaattgaacatttgtctttctccatgtgtgtcctccacagtctcaggcatttgattcttagcccccagtgtgaggcgctgtttggaggtgtcgtgtcatgggggtggactatgagggtggtttcgtttctggttcgctctctctgcatcatgcttgcagaagtgagtccccagcctctgagcggctgccgttcttgccacctgctgcttccgttccaccgtcatggactctaaccgctagcaccgggagcccaaataaacccgctcttctgtgagttgtcttggccatggcgcttcctcccagcaatagaaaagcaattaatgcacccactgtatgactctgtgtgtatcctcgctctccatctgtgtgagcctgccggcctctgtctgaatctgtgtgcacgtatgcccatgcatgtctccctctttatcttgtgtgaagcaacccccacccctgaaggcacatcagcacatctagtcccttgccaggcagtgacttaagccggactcttctctccctggagagaggtttttctgctgatggcaccagactctaatgagcctccgtcttcacacccagctcctctgtgagcagccacacacatgggagatggctggctgagattcaaggcgctgtgggcagtgtctgaggggcagcagcaggggaaatgctaaggagcaaagctgtggccctggccccattaacaactgtgatgctaggcagggacccctaggccacaccagggacatctgaggaggaggtcggggtgcgacactcaggactgggccttcatgcagaaggccattgccacctcactctggcctctctgcctgtgctctataagaactgacaaatggggcctcactgctgagattcagactgaatgtttaatgtaattaatgcatatttcatagcacagtaactgccagtgctttgctctgccggcctccctggctgagttatttacacagccatttccagctcagtcccagagtcagttgacaaatgaacaagcatccacacaacactgtctgggctttcctcatgcagatcagggccctgcaacttcacagagtcccttcatggcatttcatacctgtgccacttgctcaggtgactgtgtctcccctgggaaccatgagccaaaagtccctcgcttttgtcctttcctcctctctgttccccagcctcaagaaagtattaaaaagggtgattttatgctaacactgttatgccctgaaatggatcttagtaatacttcatttcaaaaatgcctaaaattgaagtgaggcagtgtccccctagtcagccactccatttacccattgatcagttctgacagcctgtttgtaaggcagctctgcccacaggaaggtctgacataaatcaggggctcctcagctcacctgctcatcatggtgacggctttggcaggttttcaggttcttgcgatacagatctctgcatagggacagccaggctgggagtgggaaggattcggggcagggcatggcggctgctcacatctcctttggcttctcatggaacgggcacagatccagcccgttgagcctcgattgcatcctcccattcaccaccaggaagcttcagctctctttgtgtgaaagctggactctccaaagagttgtagatcgtgagattcctttgggtaaacacaatcccatgttttccagactcgggggctaggcggaggagatattcttgctgctctttctttggcgtgaactttttctgcctctgtcttctaatctcaggtctccttttcaatcgtttaatgaaataaaaataagccgatttaggaaaaaacttcttaaagagcaaaggatatcctttatggtgtgaacacactcacacatgcatggattagtatataccatgctttcctcaggggagacatgttaacaattaccttaatgagttcatgttacttatttgtttctagtgctggagatcaaatccaggtgcctgtgagaactaagctagcacactgcactgacctatgtgtccagtcctaaaaactaactgtcatatcaaaccctttgctattactatatagtgttgccttcatcaaatatgctggccacattcatagccacctggggccacagctggacacacttgggacagaagtgtcattctaacttcccatgttatttaataatgagcatggagcagtaagtggataaaatatgatctgatgagaaacagactctcaatggcacagtcttacttttgggctcttgtctctgctagtgtccagattttaagtcctgtgtggggaaaggcagaagattcaggtcttggctccaaaaattgggttcaggtctgatacttgaatttaggaaaaaatatttaaccctcctggccaatgggacacagacagcgtaccaactgactccatcagggacttccagttcctcaccttctctaagtctcactctctgactgtcaattcccctacaatgctatcttgagaactacggaagggagtgcaccagaaccacttcacaggggctaactgtggaccacactctgtcactacccacttaaacaaggtggagttgtggtttgttggcttattattcatcctggactctcagagaggactgagacctaagacagctttatccccatttttccaagagtgcattcaaacccagaggattatggtagatcatacagtgagtatgtcccgtgtaaggaccagtgagttcctagagttgaagtccacagcatctttgccttgctgtttgaccctgggaggcacattacaaagggaaagacctcctgagagtcccctatagctagttacttaacctggagagattccatcaagcctctgaggcctaccctccaactccaaaagctcccgaggatggggcggggtagggctcatgtttccagacaccttttatgggttccctgtgggtgagggaacaggctctcctcggtaaaggggaacagtcggttgtcacattgtgcctgaaattgaactcacttcaccgcatggagattcaagctcagattgaaggcttcttcatgcagaaaggacagacttgagcaggcatcagaaatgcctggggcgcttacaaagtgatgcagatcccatgtgccacccttggggaggatgactcagagtgtccatgctttcacaagcccttgggtgaatcctgtgatctgccaggtgtgggcctgctttagggcatttgcccggctgcactcttagacatcggtttattcatgacgcctttgtcctattagaccatgtctattcctggcactctccttacctttgggttcagagttccaatgtctacctcaagcacagctagaatagccactgtaaacagaacccaataggacaccctgtgcttgaggggcaggtgacttacagcctctgaccaggacgagctcattttccagaggctggtgtgtcagaagcttcggaaacacgtctttgaaaaggttggaagggatttctcatgacagaaatcaggggtccgagtattcacaacttcctgtacaactcactaacccctagtgcagaggttctgaacttgtgggtcgagaccccatctggggtctaatgaccctttcacaggggttgcctaagaccatcagaaaacacattgatatttatgttacaattcacaacagtagcaaaattacagttatgaagaatcaacaagaataattttatggctgggagtgaccaacgtgaggaactgtattgcagggctgcagtgtggggaaggttgagaacggctacccttgtactaagccccccagccccagcaataatgattgacagcatgaatttgaacactagagccaactccctctgaagaaataaggaattcctagctggagcactttggcttgagcaacagagccccttcctgaatccttttccatctttggctaggtaactcagcccctgcttcccagttacactctcctcacacccatgtgtgcacactcactggatccaggcaggaggtgggagagaagctgaaaacatggagtatctttgttgattctgaactgagtcagatgcttttatgtggggagttcacaaagccctcaaatgtcagaactctaggactcgggacactggatattcaatctagagtttttcaaagtcttctcgagaggactgggaaggttgatcagtgctaacatgcctgatggtaggacttgagggcctgagtttgggttccccagaatccatctaaaaagctaggtgtgtgtctataaaaccagtggtagagacaggtggctcctggggctcatgggcctgtctagtcaaaatgacaatcttacaggtttcatcaaaaaacaaggtggaaagtggttgggaaagacatcttgacatcaacttctggcctccatgtgggtatgcatgggcaagcacacacatacacacatgtgtgcgtgcatacctgcacatgtgtgtgtgtgcatgtatacacaacatagacacatatgcaggccctggagatgcaggtgggtaggcaggtgaagagcactggcatagcataagagaactgaggcaggaatcagatctgtgttcggctctagcccaggagtctgtttacaaatggctccatctctgtggctggactttgttccactcttacaaaatgaagatattagactgggcttcccaggggctggggtctctctcttcatctgtcacattctaaatttcaatggtctggggtcagctgagataaggaggaagagttgtttagggattagcagcagatacctcgtgcctttaaaagggccagatgcacacagggagacagacagcaagagggaaagagcaggaagagatgctaattggaaaagatgagggacatgtcgagttgtcagtttcactcgccaggacctggtctgtgagtgctggggtagtgtggggtggattacaggaaggatcttggtcatgccagctttggtcctgtctcctgtctgtctatctgtctatctgtgggcatgaggctcttcggcagaaaagcctctgtttgttttcttaagacgattaagtctttctaagtctccctcagcagagcctgtgattggaagtgacaattggaggctactctatttaaaagctgccactttgtattagcagaaagatcagcgcagattggaggacatttcactgaggcatggtaagcccgggtcacggggacaggacctggtgcaggggaggtgagcagggaacacagcaaggaaattcacttggagaactgacctgattgaggttctactttcacgtctaaggactgtgagacacagaccaaacccattactttcatctacaaggaagaaaaaaatgggaaactgggcaatgggtggtgtggaaagctgtgagtgtgagggcacctatgggtgagtagcgtggggaatgtgtggccatctgtcattaaattaaatcttcactttcaactcaaccacaaagtcctgcggtttctgtgtctctcttcctctcctcccacatagataattcctttcttttccattccatgggcaaaagttgccgtgagagatttatttgtagatcatctctagaatgagacaccctcaacaatcccaagggccccggcagccacattatccaggagacagactgtaaccagcaatttcaatagcatgtgacaggtgctaagaggaggaacccagtgtgttggggacacagagtgctaacgatctaggggagtaaagggtgctaaagctggcatttaatagaagcaagaagaaaggtgtttagagtacagaaaatgtcacagaggtccagacttaacgtattgcaatcccagagttgcatgagtttcaatatagttggagtctgtgaggaagagaagcagaaagcaaactggagaggaagatgggagctgtaggcttagttgagtttagaactttaccagaaagctaaagggattcattggaaggtcttgacatggtgttagacacacagctttcaagatctccttggagttacatgcagggtacttgataatggtacaggaattgcactgagctgctgacccatagtaatgaatttactcttgagaatccattttgccccaaactggaatcacatggaaacctcagccttcattgcttctagtgaacggaaaactccatcagcctttcgggatctcccatttcggactctacctctctgcaatgaatttcaccaaccttgtgcagcttctgcggaggtcattgcttctgtgcttctgtttttcacccacagcagatttccctggggtttgatagaagatacaatgtattaagctttttcatggccccagaggaccctaccattggtcacagacctagttagggtctaacatcagccaaggaagtgaaaacgatgttagctgctctgagcacacttaataccaataatcctctttcaatctggaatgactaagaaagtgaactttaaagtgatgggatttttaatagactgtgggattcttaaatttgtattattttgtattgcaagttaaataatgtaagctcttggggacaaacaagaaaggaaaggttatagtttatcagggatgtgtttgtgtcgagttgatgaggaggtgtagacttgtgatgttggctaatcttgtcaacttgatatacctgagaaaatggagccacaagtgagaatttttttttcttgattgtagattgatgtaggaaggcccagaccactgtggatagaacaattctggggtaggtgagtctgagctatataagaaaaggagttgaatatgagcctagaaacaagccaccaagcagtagtccttggtttataggaacctgtctatggatagggaaccaaaagtggggggggggtgtgacattaagtggaacttcttgatagttctgaaaatatggtcttgagggagacaaaatttaaggcagatcaatcagtcagggagtttgcatcatttagggggcaccaacctacgctagagctggggtaggaagagagacggtgccccaggttttgggaatccttttaaaagaagtgttagtgctgaggctttggtgtgatagcattttggtggagggagatagatgaagcctcagccttctggtttggggacagcatgggtggaaaaggcaacaagtgtgatggaaatagcataataaatgctgtcagagatgaagtaatgggtgtgaagatattgagatgtccatcttaataaattatccagccattgttggttacaaaagtctgaggttcagaagtttggggaaataattatttgaaactcttaaactatatgtggaaattgaaacacagcataaattatcctctctctataaaagtatctagaaaaatctagaacatctagctgaaggctaataaatcagagaaatcacaaagccacggattatgacatcattgagcatgttaatttacactaaaactgtgtcacatatgtcagtgaagactcctatgtgattaagatttgaattttgcagagaaagttttcagtgactttccagacagagtgaaattagcttgagactaaggcaggagaagcagacacacagcccagagggagagatgagatcagagcacagtgacacaaagggaggaccttctgtccctgctttaccactggggtgtgctcacagctggggctacccagagagcaaggtgaatacaacagaggccacagcctaggagacaccagactgttgggaattaaggccatctgaccatcctgatgatggggcaggataccccactccttggtgcaagaattaaggatagatatgtctgaggccacctgtgcaggtgagggtttgagtgcaatgctaaggacggtcattctagcttcctccttcctcctctcctttctctttctctagggatggaacccagggctttatgctctataccaatgaaatacacccacagtcatcaattttcttgatgaatcaaaatttaaaaatccagttggaactgagaactatagaaaattcaggtttttctttcgccttctctgtcttctagtcttctctgtcttccacatgaatggttcgttctcgaatgtagaatcagtcccagccattgtcccaatggaacccacagctccccaagagtcaataaagcagaagggttgaatctacgatgctgagcaaaccttgccaagctagggacagtccaaggtcacagaaggaagaactagatgtgctggaactgggaactgccctccccactatacccttcagccaaccacaagcgcagggagggaaggggccatgcaagactctagggaaccatcccacctcggtgaatgatgggaatcaaaagagcaggtgcacttcgctgcttccaggtcagtcctgcctggcaggtgcagcccaggtgcagatgtttgcagactaggccaggccccctctggtctgggggaggggcagccattctccattgttctgcttggctcttcttgcaggggggatctttgctgtctgctcttgagagcaaggagcctttgattctggaggagcgtgcatttcccgactttgatctccctggaatcgggtctgtccgcactctcaggagagcactttacatttaaaagcctctaagctggctgtctctctttgctcacctgtggtgaagctcctttccctgtagctcatccttccagcaaaatggcctctgggcaaacctatctgggaccagaagagctccacagtcattggcagcccagatccagcctgacactgtcacctctgtcttagggctgaagggagtatccccataagggctaggtggtagaagaacagcaaacagggctggcttatgctcatctgtaacattgcaggggtgctttaagaggacatcggcaaggctgtggggtggtctgaatggacagtgccaccaccattttgagatgacaaccctaaagcctaaatcatttacgcagagcactttaggataacctgaaatagaaacctcccgactccccaccccaacccagccacggagacatgactggaaggtgctggtgggctttccaggacactgccagcctggcctgagagaaggtggttttggaggctttcagtctccacagaaacacagttgagagccagagagtttgaggaggtcttgactgtcctgtgtagtggcaattgggattgtgagcaaatgacacagattttctgaactgctactaccaaccctgtccgccaacatggtgggagaactcacattatggaaatgtcttgaggttttttgtaaactgtcaagggctctaagcaagtcagttaattatctatccccatcattcttacttatttccatctggaatcccacacaataagccagaggctgtaggacttgggagtcaagcaacttgagggccagacatgtttctctaggtgtgtgcatctttctcgtttcctactcctgtcccttggggatagtagaggcagacataccaactcaaaacaaacaaacaagaacaaaaaaggaaaaccaacaacaacaacaacaacaactacatcaaaaaagccacaaaaactgttttgagagacctgtttccaaaggtcccgaggaccagtcacaaaacacggagtctaaagagttcttccttctcccggtaggttctgcacagtgggtaagccctcctgagagggcaaagaagcacattattagctcaccgggaagggccggactcccagggctagtaagatgaagtgattttccttaatcagggctgatcacacacgagggccccaactgtcccacctgctacttcctaatcctcctcctcaactcccggccacaccctccaggaccttggccttgccctcccccaggctctgttttccacctgttgcagtgattccttggtaggatatggggacaacggcctcccggaaaccaaatattggccagggccacagcccaccttggtgccaccccactgggaaagctggctgtccatgggagtgtcctcagtaactggaaggactcctgtggcctttctagacatcaccttgcagccataacaaagagcgctcccctcagtaccacccgaagaaagcagaccagggctctgcagatctgaccacagttcatgcctgctgtgtggggtcaccgcgtgttagctttccatcgctaaccctggatttcccctccacaccgaacctgcttcctattcttcatacgcacatactcattcttgttctgtgtctctgctgatgctgctctcttgcctcaaatacactctgatatttataaatcttttgcacttagcatttcaaaaggcttttctgcctatgatctcgtccaattggatcacatcaggatcctcacagcaaccaggggagcttttgccattactattatttaaattactgctctctgttacatcggaggcacgaaggcccggggagcctcaatgactccttcaaagtcacactgtagttagagagagagctggaattacagcaagggctttgcgactccctgcctagtgcttccttacagcggtgcgctttcatcaccgcagcccccatccaaccatgcctaccggagtccacagccaacacagccctggcgactgttttgctctctttgtccagcccttccatcgtattggcttatagcaccccaactttctgttgaggaaccccggccccccatcagctcatttgattttgacagcgtggacctcatcctttggccttgtgcgtaaacacatgatcagagttggccaatcagagcagtcatagtggttgggtcccagaaaagccagtgaacccaagccagcagcagtgaggcacaattgccatggacagtctcgggagactcttggtgctgagctgagcaaacccgtagaatgtctgcctggatctgcatgagaagaaagctcacaatgagttgcgagatgtgctctccatctcacattctcctgtctgttgccaacgctagtctctgggatgcagcttacaagttgggattttgactcctgtattaagaacagaactgtgagccgggcgttggtggcgcacaatttaatcacagcactagagaggtggaggcaggcggatcactgtgagttccaggccagcctggtctacagagcgagtgccaggataggctccaaagctgcacagagaaaccctgtaaaaaaaggagagagatagatagatagatagatagatagatagatagatagatagatagatagatagatagatagagagagagactgtgactaactaaataaaccccaaagccctctgaaggctttgtttgttctttgcttctgtgtccacttctctggacggctcactttgctgcccggaacttctgatatgtctgcgttactttctctactctctgcctacgtcatcaacagtctaagcaccagccagtgccggttggtccccttctctttcctcggagtgggaaaagcacattttaatgcaccacaggtgcattaaataccttaagaacatttttttcttatctttttacacgaatgtatgtgtacatattactgtggaaaagcgtctttatgggtgtatccttgggtggacgtgtgtgtgtgtgtgtgtgtgtgtgtgtgtgtgtgtgtgtgtgtaacaagccagccacaggtgtcattccttgggggccatccatcttggtttttgagatttactgtcctggaatttgccaagaccaagttggatggccagggatcctcagggacccaccagtctttaccctcccagctctcagatctctagcacagacggcattcctgttttggtttttatcgcagacccccaatgcctccatggaaaggactctaaggattgagccatctcccaagtcatgagtttattttcttaaaacttgtttttgaaaggttggctgtgaatatcaagtagagacgtgtctgagaaagtcctttggcgactattaaatattactctactgcaagaggtgacttaggttcctgcctggcacacgatgagcatgctcttgatctcctaaatcgaaagtcagacggaaatgattgttggattaatcctgtgtactgctcaccaggccgaacccttcccctgtgagctggttggtggctagttagataagcatttaggttctgcagtctaccttcttataacttgtcactagacttcttaattagctcattcttcatcagctggctgagaggggaaggtgaggatatctgtttccagtgagacccagtataagcccagctcaagtagcatccttgggcaggagctggcgttgaggggggagtgtctgccatcttgggctatacatggtcagtcactcagtcacttcccagcttcctccaacaagcagggcaatgcacttgggaagacaagcacaagcctgtggctgctgcctaccctggcagctaaagcagctttttgtggtcacattttgggagggagttgagtggctttagctccttgttggttccagatgagaaagaactcctgggttggaaaccaaggtcagtgctgttcaaaggcgagctcctgggcgccttgccctcctcagattcctggccactcagccatccactgaggcgaacctcactccgagcatgaaaatgccccaaggagacgtttgttaagtcatttgatgtggaagatcaggagactggtgggtagaaacttctcccctcctttcccctatgatttcttgagcactttttatgtaagaccctatgatgagtgtgtaaatgtgttatacatttaggagttggtgaacccttctgagagaggtcatattcatttcctgttacagagaggtttatacaacccacagaagtctcattgttactaaatggaaaagatgggtcctaaatgccatttttttttctctctagtgtctaagctcttctgagctaccatctttgcttattctgagactccaagatgctcacacccatcttcagatgatgggcattgggttgcactgtgtctaatactacacacaggtagatttatatcacataagaccataaattcccaagcaccaggtgttgaatgctaccccatgcttcaggtagagaaaaggaagaaaagagtgtcacagtggaggtgggggatggaaagacaggaagagatgtgctacagggtctcaagagggttctagtctagatggaacaacaaagtatggatctatgaaaacctaaaagctgtaatagtaaagaccttactgaaggaacaataataagaaaacaccactattgtccacaaatgagtggcagggttgttactgttttccagtagccagtggaagaggcacacacatctttgggttcatgcagcatatctgcctggctgtcacctgtgctctcccttgtgactccctctttctctgtgagatggaataaaggtctcactgcagtccatcctacatgcccttggggcagagggtgacatggaagattctaagtgacactggtttatgatgattgatagtggagtctagatttttctcagccagattatggcccacagtttcctcaatttttatttaattagtttcctcttttcttcatcctctcccagagaaaacaaggttttgtgttctaagaaatgtttgaccaggccccacccttttggggaagcctctgtggcaggctgacttcttgtctctccccacttcctccttccctggcttgaagtcatgcacaactgtcttggctttatcttacctgggacaaacctcaggctctggggacattgtctacagtacccatatcacttcttggagctttgcaaccacaagtgaacttttctttctccctgctgtcctggaactctctgtctccttggtgtgggaacagtgggagatgttctgagcatactcagagttaacctgcctttgcacttccctgctaaggacagaataacttggtaacttagttgtctctgtttccaaagctttcgggaaagtaggtgaaactgctttgttataatgttgctctcttgactcaccatctctgtctctctctcttgaaggagaggtagatttgttacatgaaatctattcattcgaaattcagctccaggctagtataaaataagaagagttctacagtagcctctgcctacttctctgtaacaatccctcccacacacctaatgaatgattcaggcgcaaacacacacacacacacacacacacacacacacacacacacacacacacacacacacacacacagtctgtctccagttatctttgtaggaaaccagatcttccttaagttgggaatttccccaggctgtggacaatttcccctctaattaatgttctctttttgtgtgtgttgagagaggagagagagcaagaaagggatgctagagagacggtaaggagtgagactcatcactgtgctgctcagtagttcttgatggaaatgtcacaatgggtgttggtttcctgtccaagtgttcatcctctccctggctcctgaagatcaggatggtgtgtacactcactcgaggctcctcacccctttctttctgtactttagaggtagatctggcccaaaccctgcataagtggctgggcgtttggctggcacagaggaatgaccaaggtctgtgtgtccttcagagaatcctgcccctggctgggatgtggctcagtggtggagtatttctccagccatgcatgaggccttaagaggttcctccatggtggcttctctttactccttttgcatcccttgcttcaccctagggtagctctagggtactctcaacccacccagctggctgaaaggacaagctccgaagatgctggtctcagattaagccatcttcatcccccaactcgtctcatcccacaggattatcacacgggatccaattcaacctgattctcttacattctggaaatgacttactggacatgccatcagtgagtggtgttctggggatacaatgatctctgtgttgcacaaagatcaagcagacaaagtggaagcaattcagcaaggcaacttctttttgcaaaaaggatttgctggaacctaaatcgggctagtagtaagcatacttggccgagattgtctctgtcttttatccctaaggcaggtggtgactgggtctcatctaattggtggaagcttgatttcctaacctgatgcaattggataattggtacaaaggggaggggggtttatggaatacggctccttgttaggctaactgttttgataggaaaaaaacaaaaagaatttctcactggaatgaggcagaaggccagcccctaaaccctcagggcatggcttttcttacttgtgagcttcgggtgagcgcgcatgtccctgtgtgcctgtggatgacttgggggttgttatggagcagcttctgggcccccgcctgatccccagctctacaggtctgaaagtgcactttaaagatacaggtggctcactttgctgtgaacaaattctggagaatagcttgtggaggctatggggtgatgcgttctccagaaccaaatatctgtgagtcaaaggataggtgccccactgaccctgacaaaggacaagagcctgatccttgggcccccaggagaaggccttaagctgctattgaatctaaggaagggtgggttgtatgcatgagcagaggagaggtttaaaagttttcaagacttcaagaatcttcatgtgcaaatttaagtcctggtatgtgttatcagctatcaacaagtgagcagctctctgagagccaaaggatggaattataagaaaggacctcaccagtgtgcactcaacccagagtgtgtgagctccccctaccccgcccgctggggagccacagaacagtgactacagagccaggggagtaaaagggtgtgtaatgaagatccagggtggatgaagggtacatcaggcctcaaaactggagcttttaatctgttcctctcacctgccacctacatggccctgggcagagcagtcttaaagagcatagctaaggccagactttctcaaaggccaccccctacacacacacacacacacacacacacacacacacacacacacacacacacacgggccctgtctcctctggcatctcccagactctccatcttctgcatatatacaggtttgtctgtgaatcactaatttgctgttcctacccagcaggctgttcttcagatagcaaggaaatcaatcagcagagaggcagaggggagagagaaagagagtccagacccagatctagggtcctcccagttccctccagattgctgtagctcatcagtaccaggtatggggctatttgggggactccctgcagtgtggccaatcaaagcctgtctgtactgctctcctagagcacagggaagaggatgctgtcctggtttagaacctggcattgaagacagatcttgatgtttcctgtgcctgccactttttctaaaaaacaaaaacaaaaaacaaaacaaaaacaaaaaaacaccttttttgtttttttgttttttggttttttttttttttttttggagaacaggtttccctggttggcctgaaactcactatgtagacagcaatctacctgtgttacaatgccaagccttcaggaatttcttaattactgtgagccttgtcccaccccccccccaattggaaaataggaatgaaagtcaagtatcacctagttttggggggaagttgttctatttcgatttttttgttgttgactcaaatgctataaccataaaacaacttgttggggaaaggcttatttgacatatccttccaggtcaccgtctatcactgaagaacaccaggcaggaactgaagcagaacccatggaggagtgtgcttactggcttgctctcccatggtctcctgcttggctggccttctgataccacccaggcccacctgcctaagggtggtgcctctcatagtgggctgagctcttttgaatcaagtagcaatagagataatgacccagcaacatgaccccaggccaatcagaccaaggaaattctttaattgaggttccctttcctaggtgactccagtttgtgtcaaactgacaacagagttggtagctggagtcacatttgagtgcttcacacagaggctcacagagagtgggcactcagaaacatcagctgcccaaagacaggaaaagacctttccgaatttggactgccccagatgcccctgcctctgtttttattaccttacagccctcagctagctctgctttccttccatccaccagacaagacctcagaaggacaggagtctgtgagggagcccttccccttctgaagatgctcccaatatgagttcccggttcccatcttacaaatagactgcaaactctgacagcatgctgtctctcttcactcctgcagaagcctctgggactcgggtatctctgccatgtccaccaaggtgccccaccccgtgatctgcatggtcagtctttggctggagggcccacttcttactgcaagccctggccagggctatacttagtctttcagtgcaaacctccaaatgccagtgctcgggcacaaactcctccccttatctttgggctttgctttcttgtctgaaacacaccccttctgggagaccttgggcttctggtaaagaggtctctcagtggtccattatgtgtttgtgcaatgggactccttcttgagtgggctggtaagtgcccttaaaacggattttataaatacttcaggtacagttttctactggattttatctttggagacttctgctctctgggtagccactttcccaagttgaaactggacagagaggtatctgtctctgcagcactgtttaaactgtggttgacctgagagcccacatccaattactccaagttctaatgatggtgggaaaaaaaatccaggagcaaaatgaccccagggaaagtgtttccttctgctattgggcttggagagtgatgaggtgagcagcagctaggttctgggaagggaatgtcctcagatattcaggaggaagtaagcttatcaggacccagtctttatcttgaggaatcttccgtaggctgcagaatttgaccttctggctatagagctttccccgaggggcaggaagcctcagggtcaagtgaggcattagcagaaggttgctttcgcttccccaaggctttctgttttccttcccaggctggggctggcacatgccaactcctctgctctgtgggcttgcaaggacattgggatgtgctaaggaaggcaaatatgaataaaaccctctggcctccaaggccagatagcaccagctgcatttccaccagtctccagcctttcccccttgctgtccagtggtgtggacccggaatggtcccccaaacgatggtgtgttaaatgccatgtgttcctcagcttggcaacacaacctttagatgatggagcctagtgggaggtttcaggctgagggtgagttatcagggtattggcagatagggagagcagcaatgggctcctaagaggactgcttccttgtcctctggggaaagcagtgaggatgaaatggcatgcccagtggccatgctcgggtgaagtgtagggatggcgggagggtccaggagcgttatgaaatgcccaacccagcaccccctgactcccaaatctgatgccaccccatccccactggcccttgaaggtaattgtgggacccccatcttttctccccttctctttgattgtcctggagtgagcagtttactctatcccaaggcaccgaggcaccaatttgccataggcccaaaagcagcagtgccaactgaccatggatctaaacatccaacactgagccaaaacacaccttttccttctaagctagttatctcaggtgctcaccacagtggtggaaagccgggtgaaccatttccagtcactctggtctaacaggcaaagaagctgtccagaaagtcactggatatccttccctcctcctgcattctagcttgaggttgtgctgatggacgggcatgagtgaagccattgcagtctgagctctatccctcctttgtgtgtagttttcctcccacggccccttgctcgctgcctctgcaccgaattgtgtgcccctggagaatggacttgcctccaggatatattcttaacacacatttcccaccactcagacgaagaacagttgctataagcccctcctccagagaagggaagagtagggaacagccatgagtgtcactgggacagaaagctagcatcctcaggatgctgggaccctggttccagcagcccctactcctcctctttggagggttcctcttgcctgctctctttcaaagagaaggacacagaaacgttccttgctggggatctaccgctttgcagcccacatcctgttggcatacgggtgatgttaccttacggttcaaacagctgtgtctatattttaaaaggaactagtttgcctctagtctgtctctggccagtcatttccccaagataaagatctaccgtggagtctgagtttgcaaattcttctctctggcctctgggtcctgccttgctcaggctctccattcagtgccctctgccttgaggcagttgggaacaatagcttggccaggagcaccatccacaatctgatttttcccagcagcatcttcacaataaacatgagtgttgcctttgtctggcatgggcgcttcacaggaggtgctgggagaggcacaggcgactgccctcaatcttatctcttgctccatctccgtcccgggcctcactctgctaactgtgtctaagagtgcaggactccagtccagccctgaaaggctccaagtcactggacttttcgctaatcgtttcagatctcagggtatagacagaggcacagacagacgggtagcacctctcttgggcaagctgcccttttctttccctgtgttttcagataaaccagctttggtttgagcttatctttctccgtctaacctgcaagaatcagcagggatgtcagttttctaagcttcatccagcatttctcttcattttaccgactctgtgcacacatggctggtgtcctggattttggctggtgacaatctggctgtatatcttaccaaaaacacaagagtctctaccgctctgctggtcaggcctcctctggtccatctcctcgttctcttctacccagccttgctggggggggggggtggtcagcttcacacaacacctcagttctgctatgaagttttctatcgtgtgtatgtggatagattccctgaacgataataatttaatttgtgctatttagaaaggagcggaataaagggaaccaggacgagaccgcgtagaattctgtagtcaacacccatgtgcttcatagagcatgtcctgtattcggggcaccgagaaggcagggaaaacaggaaaaggtgaggtccatgttccaacaaactcccagactgacagtgtgatcatggggcttcacagaggtgcacaccacaggggtccagagtcaaggcagccgcccaacacccagaggtcccagaaggctgggaccagacaaatggaatgcatgtttcaaggggccaaggttctgcctggtttgttccctgctgtgttcctaattctgttggaatgctggccacttagcacatatgcaagaagtgtttactgattgaataatatcgatcctgctaagaatcacaaaagataggtaagaggtattttaatgaaggggtcacctgttctcaatgggcctagaggacagcagtggagaggagtctggggaagggcggagacggattggtatggcttcataatgccaagattaaaataggatcaaagattccagaagtggtgaggaatacatttctatccttcacctagtactcggactgttacagcagcgcagaacagactgagacacagacgcctcgtctgggttctcgcctgacatgaactgtcacccactggatcagagtagagccgtgccaagtcgagagtgggacatttccctgcaccccacaccacctcctcatccttccctgttctaggggctttcgtccatacatctgatcagtgtgcttaagcttctgtttttgatttcttaacctttgtcacagtatcttaataaaagccttagcttccttcccctccccccgctgctgtctccttctaatattgtcacgtgttctttcctgtttgttctactgatatagttcataaattttaatagtgtgcttaaagctttacatcttcacgcactcactggaaacaccatttcttggcactatgggaagctaacatctctctaccacccccgactctaaccctccctgaccccctcccccgacccccctatgtatccccgttattaccatttcttttgcttgttacatgtacatggtgatggatagctgtatttcattcgcctagggtttattaaaaatttgagccagccagccagaaagcaaacagcatttatctattttagagttgatattaggccattattttctcatgtaacttggagtttctggttacctttcatttttactgttgaccaaatgcaaaacaaaacaaaaaaccccaaaacaaaatgaaaaaaggcttttccgttctctgtaggagatggttggcttgtatgccgctccatatgcaagcagcacttgtatcttaggatggaggctgggtctccccactatagaggatgaggaaggaaggcagggcaggctttccagtgaaacacgagtgtgtgtgtgtgtgtgtgtgtgtgtgtgtgtgtgtgtgtgtgtgcgcgcgcgcgcatgcgcgcgcgcgtgcctctgcatacatttctggagggcggaggtggtctttaggtgtcttcctccaccgctttctgctctggtttttgaggcaaggtctctcattgccccaagagcctgccatttcagctaggctgtctggccagagtgttctgtctggggggatctgcctgccatgccagcctctccatcttggggttacaggtgctccctgctgcttgggttttatgtgggttctggggcctgaactctggtcctcatgcttgtgcggcaagcctgttatctacgaagccatctcctggcctcagggattaggatcttgattggtgtctggcatctgggagttccacaaggaccactggcagtgcagaaagtgtgtcgctgtgctggtgcctgagacttgcatctgggtctgacctcgcctgtgtttatccctgtttggctgagcagtctgagtctggtgctgtagaaacattgccctttccgcacgttaagctttccctgcctcttactgtttttcattctcttgaaatttcaccagttggatcatttctacatgtctggaccaataatattggcgtccagtttgctactaaagttcctgacttggtttttgttgattacgtgggcaaatatattcagcactactatcgtttcacagctccttcctcagtcaccccttgctttggcaacttcgtttctagtagcgctatcaagaatagttcattgaaatatatttttatatccatgcctaaaactgtctctctgtaccagatacacatagttctagtctagtctgaaatatgtgagtcaggctttcatccttaaatgtcacttaaatattgcttcactgtcttctaggactggattgcagtgtggagaaatggaccgtatctgtactttgtcctcaaagaccatgtcagatcccttggcaccggagggacggatggttgtggccacgatgtgggtgctgggaaccgaacctggctcccttgcaagagcagcaagtgctcttaaccacctaagccatctccccatcccaacatttctttatccactttgttgcttgttttcagattttatcagggcagagaggagggggactgcagtggttgaaatgctgaacttattttctgtttttccctgtaccagtgtgtgtgtgtgtgtgtgtgtgtgtgtgtgtgtgtgtgtgtgtgtgtgtgtgtgtgtgtgtgtgtgtgtgtgtgtgtgtgtgtgtgtgtgtgtgtgtgtgtgtgtgtgtgtgtgtgtgtgtgtgtgtgtctgtgtgtgtgtgtgtgtgtgtgtgtgtgtgtgtgtgtgtgtgtgtgtgtgtgtgtgtgtctgtgtgtgtgtgtgtgtgtgtgtgtgtgtgtgtgtgtgtgtgtgtgtgtgtgtgtgtgtgtgtgtgtgtgtgtgtgtgtgtgtgtgtctgtgtgtgtgtgtggtccgtgtgtgtgtgtgtgtgtgtgtgtgtgtgtgtgtgtgcgcgtgtgtgtgtgcagcgtttgctctttggggtttggggaagggcctgtgtgtatatgtgagtcaccaagactagctgttttctacaacccagacttgccttccctggaagcgatagatatggaaggatagatatgtatgcatatgtacatatgtgtatatatgtgtatgtatacacatatatagggacagacagatggacagacagggatgatagagagccaaggaagctgtaaatgagcctttctgaggagaatgtttcctagccagcttcctcttcatccctgtactgactagtcacaaaacagcatctgcccctagagcttctacccttgaggccttataatcattgcatcttataacgtaaaaggctttgcttgccagcgtgcacattttccttcccatgaggcacctgttttctgagtctcacgtcttgctgtgagtctcctcacctaagttttgcttcctgctagactaaacttttttaactagatctgacatgtacttcggaagacacgcaccctgtctaaattgggggtggaaatgatctactgatatccaccagggattcctatgaaactgcctcagtgttgagcctaactctcgacttgttgtccacacgaccttttacaaatcacttcatctcacgtgtcttcatcagaaaagtctgtattagttgtaccctctgtagagtgtaaggtagtgagatggcacacatacattttgaaacacaatgcttggacttcagaaaatctaatatcaatgctagcagggttttttctcccccttggtcagtggaaatgtcatcagtgggattggaaatatttttcttggtgcttttcatccaccatgtgggagccagggaacaagttcacatctctggttggtggcaggtgcctttctgtgggcacatttctccagcccagaaggatgaaactttcggagccaattgcattgctgggttttgaccaattcacaaagcacacttgctacttagatggctcctcttcgggaagatggctttgctttaaagagctctgtaaatttctgtaaagactacaggactgactcactggtcaagaacacttgctgctcttgaagaggaccagggttcaattcccaccatccacatggaggcttatgactatctgtaactccagttccagaggatccaacaccctcttatgtgcaagccaggtgcacacagggtgtgcacactcacacacacacacacacacacacacacacacacacacacacacacacactcattaaagaataagaagagagaaatgatggcttaaatgtctgtcttcgcatcttcaggttcttctctccattgtttgtttctctgtgtctactgatctgtggttatttgtccatttctcttaagagtggcattcagttgattcctagagatggctttcacgggttccttctgccacttctggcccctgtctgtcccacaacatactatgggcttcccttcaggtgtattgtgagcactggaagtctaggactaagtgatttttttctctcagaaatctgaatccatgctctgcctggtgcaaacaaggagatccctattctcaggcttcagcttccaccctgggaactccaggcccttctaggcagatcggcttgatttctttggagagcatttcctgtgctcccccattcagcctggagataaaggtggccctgctgatgggggcaggggaccgacagtgccaccattcataggggctttgcccatcagccttctcaggtggggcatcagccagcaggctaacctttgcggagtggtgcccagaggcatctctcaaactcaacaagtgcccagaatctgagagaaggaactttgtagccagatgaactgtccagaacatggcacaggaggtctgggaagggtagagctatgaggtgagactgaggaaggccggccaggtgccacgagcacgtgcagttggaaggagtttgaaaaaggatgtgtggggtcttgaaaaacactaccagggttataaaagtgaggactttctaagacaaaagtgtttgtgtgtgtgtgtgtgtgtgtgtgtgtgtgtgtgtgtgtgcttgtgtacatgtatgtgtgtgtggattgtgtgcatgcgtgtgcttgtgtgtgttatgtttgtgtgtgcattatgtgttatatacctgtgctgtgtgtatatgtgcattacatgttatatacatgcgttgtctatgtatgtgcacgtgtatgcatgtattatgtttgtgcgtgtaatgtgtgttttatacacatagtccctcgcacactggggatagcatgtggagaagaccaggtgctccagtgggactcatctgacttcagcatcatcttggatgatactgaggaccatggttggctgctgtgggccaagactggacacactctgaggggcctgccgctgagctcatcccccagcctggccctatggtgttaggagccagaccattcatttctgccaatgttttcaggccacatccttgggcagggtcttaaacaatttgacaggccaaagactcactctctgcactatgatgccaagtgtgcacgccctcatacacttctgttctttatgcttcttcagcttaccacatacagggtttgtatagcccctgacatgttttaaaggtcatggtcaccatgtgaacatttttttttcccattagatgaacaattgctgtgcagcaggatctatgtctttatcatcattttccccttagggttttacataattcatggctgatagatgctaattgcatgttttgctaacatgtagtatttctacaaaaaaaaaaagactcaggggtgtttctttatgtctatttaattatggataaactgaggcagactagaagaagtagtcaagatgatggtggagatgagattaaatacacacacacagacacacagacacacaaacacgcagacacacagacacacagacacacacagacacacagacacacacacacacacagacacacagacacacagacacacacacacacacacacagacacacagacacacagacacacacacacacagacacagacacacacacacagacacagacacacacacacacaaacacacacacacagacacacagacacagacacacacacacacaaacacacacacacagacacacagacacacagacacacagacacacagacacacacagacacacagacacacagacacacacacacacacacagacacacacacacacacacagacacacagacacacacacacacagacacacagacagacacacagacacacagacacacagacacacacacacacacacacacagacacagacacacacagacacacagacacagacacacagacacggacacacacacacacaaacacacacacacagacacacacacacagacacacacacacacacacaaacacacacacacagacacacagacacatgcacacacagacacacacacacacacacagacacagacacacacacacagacacacagacacacagacacacagacacacagacacacacacacacacacacacacacacacacacacacacacgttattgagtcagattagagggcaaggagagggagtgaagaaatgttacagttgcaaatgccttccttgtgtttgctgcagtcagagggatggagatgacattggacactggccagtcagacaggtggaagcagaagctcgggtgcccacatcagttttgtcttcaattctagtgctgatggcattagcagaagaagacattgccatcaccatgcccttgaggagttcaaagcctcaggacagtctctgaaaatagaacagtcacctacaggatagagtgaccagctctgtgctacagacctgctaattgcagagggagggtatcatttttcaagcatgtcaaagggataacttctgagatgggctttgcaggatggataagggttggccaggcgaacgaggaagaaaatcagtattttagacagatagaggaggctgtatgtaggtaacgaggctttaaatgtttattaatttattattatggttgttgtcattgttgtgtctatgcataccgtggcatgtgtgtagaggtcagaggacagtttggggaagccagttatttctctccatcctgttgaagcaggccctcttgtttctgtcatactatataacccagtttagctggcctgggagcatctgggagattctcctgtctctgccttgcatctcaccacagcaatgctggggttacacagaccctgctatatctagttagtgttggcgggttctgggatcactcttgcaaggcaggcccatttgcctgaggcatcacctcaccagcctgtagtgagactttgcaaagctttccctggtgagctgagaagacctctgaaggcctggccttctatgagaggaaaggaaggagtggtgctggaagaaatcaggaataatcaagcaaagaagtataagctgtcctctaagtcatgggaactacaaggatcctaaaagcaggacaaacacagtaaaatattccctttgaaggaagagataagactactttgcctcatgttttctggcagctaatgtgtaacaaagacactcaatcttcagacttgtgagtaggttttggagagaggcattcccagggccggtctttgtatctagatagagtctgcagagaagattctgctgctgatactcccccacccatcagaaacccccttaccctagggtcatgaccctttgcacagactggtggtaagctggcctatcagagtcccagtgtgcatccccacctcaccagccctctttagagtgggaaaggggacgagcggggctgtggcagccggactccctttgcctataccctactccaactccccctcctcccctttgcctcttaagctctgcgggcagcccagagccagcgaccttcagcaagctgagcaaattattttctgctaatgagcttaattacccagctctctatttagcatgcacttacagtttttgtaaaggcctttggaaaccctttgttacatgagcaggtactcatgcaaaaaggtaggactgctcaggccttcagtaaccggcagccatgaccacagagggaggagtctggtgctccccaccttttccctgcacagctgagcaagataagcatggctttcactcttacaagaatgctgagccctgtactgttgaaagacgttggcttcctccatcctagctggtatccttcctgatcacatgatgtcctcttcaaagtttcccaagttgtgggagacacagtgtcctctacaggacctaccggacagtcagtgttactgtggtagaaggctgactaactggggaagacactgatctttggatagaaaagcactgaggatttggaataaaaggccaagacttgctatcatctgtctttggggaggcacatatatagtctttcagggaccaggtttgctcgtgtcgatgacagacctcggaactcagagaggagccactttcacagtgacctgcagtgcagttgcccccttcttatgtttgacttcacatttcctcattgtaatatttctctggatgatccagtaagcgattactcttgaaatggaatctcctgtcaagagcaaaatctgcaaacatggaatgttgacctgggaatgaccaagactgtccaagtgtcccagttttctttctgctgctgtgataaaataccctgacagagagtaattcagagaagaaagagtctagttaagctcacaattctagattacaacccattgtaatctagaagtagcagggaagtcagggcaaaaaggaatttgagtgtccagtcccatccacagtcaagagcagagagttgaaccaggcatgcactactcagtttactttctccaactcctatacaacacacaatctagacctaaggaatggtgatgcttacgtaggcagtgtctttccacatcaatcatacaatcaagacaatcccccatagacttgcccacaggccaatctgatctatgcaatccctcactgagactttcttcccagactatgtgagtcaagttgatgattaaaactaattgtcacatcaggtaaatgccatgaattattaagggtcatgttcaacacagaagacccagctatgggtggttctctctggtctttctggagaaagacaatttctgagtcagcccaggttattttcctactcaggtcccacatttgccagagctgtcatctgtgaccagtcttaggtagagagccacagacataggtataaaaataaatatctgtgtctgtcttcccaatatttttgatgagaagtatcttagagttctattgctgtgaagagatgcatgaccatggcaactcttataaaggaatacatttaattggggctggcttacagtttcagaggtttagtccattgtcatcatgtcaggaagcatggtgacatacaggcagacatggtgtagagaagaagctgaaagttctacatcttgagccataggcagcaggaagagagagagagagagagagagagagagagagagagagagagagagagacagggagacagaggcagagacacagagacagagacacagagacagagagacagagacagagacagagacagaggcagagagactgggcctggcttgagtacttgaagccccaaagcccacccccagtgacacattttttccaacaaaaccacacccactccaacaggctgcatatcctaacagtgccactcccaggtgaccaagcattcaaagctatgagtctaggggggcggggcattcttagaaaccaccacaaaaagtgaaaaggccttcaagaaagagctcactgggcttaataagccttgagaacaaaggtctgagcccaaaggattcactttgatgtctctcttcttcccaccccttgtccatgacttggactttgagtatcctcaccagagccttatgtgtccgtggctaagtccaagacaggtggtgccatttgagggggttatggaaggtggagcctggttggaggaagtaggtcactgggggcaagttcatatggcatctgctcctggctccttcctgtctcatactctatttcctctcatctctgaggatgacacatctttctgctgtcagtcacaggacaccctgcctcaccattggcccagaatcagcagagtcaaggatcaggggttaagatatctgagatcatgagcctaaataaatccttgctccttcaggctaaataaatccttactccttcagacggtgtggtcacaaacttgttctgtaacagcgatatggtctctctttatcctatgtttttgtttttttctgacagtttatttgtctgcccacatctctcctaatgatttagctcgaacctaatgatttacaaatctatagaggagctgagacataggtgactgagatgcatcacactggagggagaagaggtgagcctgggttttaggaagagtgtggtgtgaacctttgatgttcaagggaagaattaggtgggaagggccgtgttatccgagtactggaaatgagtattgctcaggctggaactaagccagcagcgaagagctagtgtcgctcaaagtcaggcaaaatcaccacctttcttccactactctgaatggtctacatggtcagaggccaccaaggagctgattctaggaacagagccaaaatccagtcaattaaggggagccgggagtgtttaagaagcagtaaccccatccatcaatagaactggggcactcagcggaggataggccagaggctcatagcgaattttacttgacattgaaaaaaattggctttagggaattttttaaaacagttccataggttcttgattagaattctaacgtgtcctgcagcttgattccagataggaagaagggagccactcatgtacattcccattcactgccgccaggcacagtaacgtggaacaaagacatcagtacagagaagccagacagctttgcttgtccagggctgggagaagagaggaggtgacagccacagaaggcaaagcttaggcttgggtgtcataggcaagtgttaaaacatggctccctctgtcctctctacatgctgccactcaacctggcctctttagtcactactacgaccacaaatcacggcgccttggaatctttgcccaccctctcctagcagtgcccacccaggataaaattcgggtctaactgagagaggcaaagagcgcagtattaatggtgtttccatactgtgaaactgtgaatacctctttgatgttctctaggctgggtgactaaaccaccacagattcttcttggttctggtgatgagaagtctgagctaaagctatcagcaggcttggcttctctaggagtctctcctaggctagaggctggtccactattctcaggatcttcctgacatctggctttgtccaaatctccttatcaagtcagatttgagccctgcatctgacctcgttctacctcggttacctttttaaggtccttatctccaaggacagttccattctgagttacctgggcctggaactcccacatgtgaattggcgtgggttacctttcatcctatggcagaggctacaagagatgttagattttatttcattgaattttggtcacctccttcaagggcctgtattgagcaccaactctgcatcaggtcctctgcagatgtgtgtgggggtgcaatagggaccccacagatggcagaattccatgtttccaaggcctggaggctctaggacagaaagacagagagtaaatgacatgttgagtatccataaagttgtaggtgaaaattaaagcagggttggacaagcagctgcgttgttttgcctatgtcctacccaaagaggaggtgccccttgggggcaggggacagtgaaacacacaaccacagcttccttcacgtggctctggaccttctgggttcacatctgtcttctgtcctctcttgaccgtttgtctcatcaataaggctgaagggcccagtgagcaggggcctggctggcttgtagcaaactcatcacatcagtggagaaaatttccagggtgttttccctgtgctatggggaaggggagaagagttatcaacagttatcctaaaggatcagctgaagggaggaagaccctcccccagcgtgggcatcaactcccttggtggtccagttctgaagctatctgaagtaaagcagggctgctgctgcctgcctgcctgcattcgttccttggcccatctaccctgctactgccgctgctgtcaccatatgtcactgatttcagagcccagatccttctgctttccagtgtggactaaagaccggtggctccccaggaacctccaggtcttctgcaccagatctgagctgctgggcatccagccttgtgaactgagcagcttctgtgttctcagtcttgcaccagataaagccattgctagactgtctacccagtgggtgttgtataagccaatctaatacctccctttgtgatatgtattctgttcccttcttttagacgtccactttcttaaaagctgatgagatgaccctctaaaacattttaggaactgagttcctaatataacagtgttgggaggtggagcctgaagtcaagtgtgaaggcgtgggtgtgaagatttcactaggcccaggataaatgataaatgggtgtttattggggaacacttacacagaaaaatacaaagaactacaaggagcatttctctgagggatctgctgacccaagcagaagggctcccccaagtgagaccgagccttaggcctgaagccacgcccaaaggggtgtggccactgtaacagacaagaccactacaaaggtgtttaggccatgatggcacaaatggatggggatggttgaagctatagattggagcctcttgctctctagtgcactctccatccttccactaaggggcagtgcaccaagaaaggcttcagtgggtatggtcacttgacctgggacatcacagcctccaaacctttgagcccaagaaggttctgtcccgtacaaacgtccatccctgtctgtggcactgtgttacagcagtgtgaatggaccaagaggaagggactaagttctgtgggaacctttccttccctttcttattgtccctttgctgtgggcactgatgtgacacagaaactcagaacatatgtctctctctccctctctcactcattccctccctccttccctctctttctctctctctctccctcctccccctctttctctctctcccttcttccctttctctctctccctctttccctctctctcctaccctctctctctctctctctctctctctctctctctctctctctctgtattaatgcagaccttctcttttggtactgttactttgctttcaggcaagaacccagccttggtggacagcgctgcgggtcacagcagctgatcacctttcggtttctcactcgaaggctctggttcacctgctttgcccagtcaagttttagtgagctcttttcctgctctttctaaagagttctccagatacttagccttgttcaatgcatgttgacaacttccttttcccaggccgtgtctcaccctttcccttcattatataaaatttaaagttgaatacaccatttttctttcatcatgtaccgttttgatgacttgaactcattttcatggttctctccaaatctcttattccactaacaaaaattatccatcttttattattattattattattattgtgtgtgtgtgtgtgtgtgtgtgtgtgtgtgtgtgtgtgtgtgtggtgtgcgcgcgcaagtgtacgcctgtggcgtaataatgtgtttgtagagatcagagcataccattgtggggtcaactctcttattcattttcatgagtttcgggttgaacgtgggctgtcagtctagggcagcacgtgtctgtgctacagagccaccttgctagcctcttctacgctctttgtggtggttttgctcaaggacattcttttgaatacaatttgcaaaggtcagatggcactgtcctcataacgaagtgtctgtgtctggattctgtgactacattccttagagatggggtttctttctcttgatgacggtgttggcccagagaacctaagcatgggtcagattctggaatctctctaggtcttatgtgcatagaacacttccactctctcctcttgttcaactaagacattaaaatcacgaggcctaagaatctgagaacagtaaagccttttctatcctgtttcctagtcatggtgcactggaacatctgtatctctgtctgtctgcctgtctgtctatgtctctctttctgcctacctacctacttaggaacctatgtaggctgtgaggtggtcatgcatgtgtgtgtccccactgcttcttataaggaacattaaactgatgctttggatcatatgggagctggcttgtaagagatgacctggtccaggaacatagaagactgcgatgtttaaatagactgaggtgtgatccgctgcattcaagcccagcagcctgacaagttacttcctgctctcagcggggattggggcaagtgagatgcttttgatcttagggtctgcagttagcagcaggtggaagagcagctggagacttgccctggctcttccacgccttggcctggaaatggcgcataccctttccacctgcagcttgttggtcaggctctgcctgtgagctccccacaacagcacagtggctggtagtatgagaaggcaaatggctacagatttgttaagcgtgctaagagggccagcctgcgactaatgtaccacccacaaaatttgtgtgattgggaattaactgaggctgtagctgacatgttgagcaccacttgaaacttacaggtcagggtattctgcatataaatggatagccagttctttgcatctgtaggcttctatttgtagagttagtgaacctaactctacaatatatatatatatatatatatatatatatattatatatatgcttttgtattgaatatgcccagacttttttttggccatgatcactccaaacaccatcgcagatcagccaattacagaagagttaggtattgcagggatctgggtgatgggaggaagtaatagattctgtacgttttacaaggggcttaagcagccattgatttgggtatctggaggggtcctggaatagatgcccacactggtgcccctgcacagttacaaagggcatcaccaagaggaaaaacgtgcctctgctttgggactggaaggatgtccgggtggttgtcaaaggtaagggagacctgtttcctggtgggcacaggtttgactaagggctcctgtgtactggtgggagcgtgtacacatagggaaatcaagcagagtagaacaattatggggattccaaggtgttccgaatctatgaagaaaaaccctgcgaatggtttgtgacaggctacaggaccacactggacagaagcccacaggcccttcccaagggaccacaacatgtgaaagagaattaaaactggatacccagtccctcatgtccccaagaattctgcaagaactgtcactaaattggtatttaggacaaaagcagggagaaaaagaaaaaaaaagaaagaaaagaaaagaaaattaaaaggggaaaaaacccactagtgatttccagcaaagaaggctgtgggaaggaaggggagttggtatgaaaggaagcatgaggagacagcaattgttttccctctgcggccataagaaggctaagagggtccctgaccttcaggcaacttgtgcaatttcagggtctggagagtggagaccgggaagaaagtcaccagggaataagtcctgatggctaaacacagaacagcctcatgggcttcatggatgaaatctgtgctaaaacttcattgaggagggaagagggaacaatcagggggtcaagagaaatccccagaaaaaatcctccagagggctttggagggagataccccaggggccagaggactgagggagttaccccaggggccagaggactgcagggtcctgggactctacattcatgaaatatggagtgttggcaacaagcagccagagacctggtgtgctattaataaagcagccaccatttcttgtgtcctctctaagtgactgacacagcccaaggcacattagatatctgtccgtctaagaatacagctctaaaagctggagggatagcaagcagctaacacaaactagaacaggaaccagcgtgggtgatgctcactggtgccctgggcctgtcattcgggctttactcagagctccatcaggcctgtaaacacaagaaacagcactcacccccaaagaggtacaaaatggtttattctgaaggcaaatatgagtgaccagggcttaggataccccaaattccatcttctaccatggaacaggttcatgaagcatttacagtagcagaacaaggccagaaataaatcaggacattttaaaatacattggtggaaatataaggtatatggcgaattggggacgtttctgctgtagaccttagatggatgccatgtgatggcatcctcagtccttgggttgatagaagccacctgtatattccaagaggatttacctaatagtcataataggtcacagacacaggaagatgatgcctgttcaaaggaccaaggtagcccaaggtaatctgtgcttggggctgggccctcagcatgccatcctcttcacagttgctgaagttctctcagcgtttgtaggatatcccaccagctgtgtcgtctcttggggaactttagctgacaggccacgccctggtccgtccgcttctgttgttacattcctgagtttcactttcttcatctgtgattggaggaagacgacaatgaggtcagaggacttggagagagggatgggggcagacagacagcggcggcggctctcacgcaggcccgtctggtctatatgcagctctcacgcaggcccgtctggtctatatgcagctctcacgcaggcccgtctggtctatatgcagctctcacgcaggcccgtctggtctatatgcagctctcacgcaggcccgtctggtctatatgcagctctcacgcaggcccgtctggtctatatgcagctctcacgcaggcccgtctggtctatatgcagctctcacgcaggcccgtctggtctatatgcagctctcacgcaggccagtctggtctatatgcagctctcacgcaggcccgtctggtctatatgcagctctcacgcaggcccgtctggtctatatgcagctctcacgcaggcccgtctggtctatatgcagctctcacgcaggcccgtctggtctatatgcagctctcatgcaggccagtctggtctatatgcagggctcctccatcttcacgtcctataggcactgggagttacagggctaaataataacctgatggacaaacacaaacagaacttgggtttcctggttcctcacatctggggcttttactagctgctcctgccaagccacagggcagggtgaacacagagcacaaggttggtcactaaggctgaaatgttgaaaagtgacaacaaccagttccgggttacaggttcaggggcaagcagtgtcataagcatgaccctatttcctaggaggctagggagagactttgtctctagactattctagaagggagtagcctacctgacatcaattcctacacacacacacacacacacacacacacacacacacacacctacatatacacatacactcacacatgtacactcacacctatacacaatacactcacacatacacacatacctacacatacacctacactcacatctacgtacacacacacacacacacacacacacacacacacacgcacacacacacacacacacacgtacacatacacacacctacatatatatatacatacatgcacctacacatacactcacctacatacacataaacatgcccatgtaatggggtatatatggacatcagaagataacccttggtcttgtcattcatcaaacattatcaaaccttatcaaacttcttcctttcttttacttgtttgcttttggttcttttagacagcatctctcattgactcaaagcttgccaaagtgtcttaggctgtctggccaatgaaccccagggtatgcctgcttctgcctccctggctctgggattacacatttgtaccaccgtgcaagcatctttttaaaaattttatttaattaacattttttcatttattttacatatggaccacaatgtcccctcctcttcccctcccccctcctcttctttcctctgtccatcccccagcactcctatctaccctctccccatccactcttcctctgtctccttcagaaaggggcagacctcccatgggcttgaacagagcttggcacatcaagttgaggcaggaccaagctcctccccctgtatcagcatggaggacaggttcccaaaagccagctaagtgccagggacaggccctgatgtcactgctaggagccttacaaacagacaaagctacacaactgtcacacacatgcagagagtcccatgcaggctccctaactaactgttagagttcatgagctcctatgtgctcaggtcagctggctctgcgggttcctccatcatgaccttgaccccccaggcttatataatccttcctctctttcttcagcaggactcccggagctcagcctcagtgctcggctgtggatctctgcatctgcttccatcagttactggataaaggctctctgatgacaattagggtagtcaccaatctggttacagtagatggccagttcaggcatcctccccactattgctaagaatcttcaacctatggaaatctgtcattgtgatccaccatatataaacaaactgaaggaaaaaaaaaacatgatcatctcattagatgctgaaaaagcctctgacaaaaatctaacaccccttcatagtaaaggttttggagagatgagggataatagaaacatacctaaacataataaaagcaatatacagcaagccaacagccaacatcaaattaaatagagagaactcaaagcaatttcactaaaatcaggaataaggcaaggcggcccactccctccatatctattcaatatagtaccagaagttctagctagagcaataaggcaacaaaaggagatcaagggggtacaacttggaaaggaagaagtcagacatgcacagtatcttcacataggttctgatgccagatgctggtcctcacacttgccaggcaaacactgtacccaaagagccatcttttctgcagggtttcctcttgtgacccagaacaagtggctctcacctcaggggacctccctcggcctcctgagattggtgcttccacccattatgcttctattacacaccatttatggcccagatgctccttcataatcaggaaacaagaactgtgtctccactttcaaatgtggcaccatttgctgtgtcctgatgcaaaaatagcttcctaggctcagaatggtcgagattctgagccacagatttgttccataaagaatgggggatgagggggaggcttcttggaaaattggctcatttatagactccttgactcgagagaggcccagggaaccatgaagtcaggcttactcctcttcggtaggccccaggcttccaggctcagtgactggcgttctacacatcacagtgatgtgaacgtcacacatagttccagagttcccccatggctatcttagggtctccactacttgttagagaaatggggaacctggattcttcctccttctacaagtaagaacttgagatagtgttaacttcctggggaacaatgttccttaacatttgggcatgattttttttttttaacttagctcatctgtgtctggaaatatacatgacagaaacagacagatcagcacatgcagaccagtgaacaagccggaccattggtaccattagtaggatgctaatcaccgtgacagacagccagaaagaaccaaacttggccaccatagcaaggaactaaattataggaagagctggtggaaaatagtgtgtgtgtgtgtgtgagtgtgggtatatgtatagaacatatatgaagtaattattgtgtaaagtacacaacacttatacttcacggtgagggggttatggtgcccagtaaaaggcaagtccccagaagtgtctagagtatataggatagtgtgttcctgtgcccatgctcagaaaacggtgaccacaaggaatagctggatgttaattccccttgtctggcggaggtgggcgattctgcccctgtgggtgctcaagtatgtgcagatgcatgtgtgtacagagatccacctgtccatcatgcttctgatggagggtccattactggtctgaagtttgctggttgggctaggctggtgggcaagcaagccccagagattacaaacacactccatcacacccagctttttaaatgtgggacataggtccccatgcatgtgcagcaagcacttaaaggactcagccatccctcgagtccgacttctttctttgagccctcctttcatgggtttttacattaaatttgaggttttgcaagctagctgttgagatgggtcagcaccgtccactctgcccagtggctggttccagtggccttacctgtgacgagaacacagcatctaccacttctacccaagagggcttcaatctcagcctcactgggatcacaaagaaaatggcgtttagcagactccggtggattatgaagtaaccttatcaactcagcatggctccgtaaaggagccacccagcagtgccagccaagcctggaaacatgcagtgctgccactttgaaggagttgtcttcttattgaagaacagaccacacaacaaaggtgttgtccacttctttgtatccagcccaggctggaggaggctccagagatgggctcctccagctgtccccagtcctggcactggaaacagtggcagggacgccatgtctgttgatgtattaccaaacacttttccctggtggcagaatggctacaagagagccgtgagggaactgacagaaaagtaaccgcgtctgtcacagctcgattttgcagatgtttgtgttgactttatgtctgacagttttgataaattcattattcattctggtttgtttgttcttttcttttttcctgtcagtcctggggatcaaagccaggccttgctaatgccccatacccgccatttagggatatgcccaactctggctgttcctcagcgtgagctaatgtattacaaagataccaactgcaaaatacaatgttccgctcacacgtaattactgaagtcagtgggccacagaataacttgactggtgaagcatgtgtatggaaagagtgtgcatacatgtgcatgcgtctctgtgcatgtgtgtctctgtgcatgcattcgtgaccctgtcatacatgtatgcacatgactgtgtgcatgtggcctatgcctgtgtgtgcagatgtactcatgtgtgtgtgtgtctttccccttagtaaagctgtgaaaccacagctgtgtgaaaccaccaaaccctgggatagttgtgaaatacactcctatgtcatattgttctaaaaagtgggggacaagccgggtggtggtggcacaagcctttaatcccagcactcaggaggcagaggcaggcggatctctgtgagttcaagaccagcctggtctacaggacctggttccaggacagcctccaaagccacagagaaaccctgtctcgaaaaacaaaacaacaaaagaaacccaaacaaacaaacaaaaaagtgggggacaggtggccaggccctctgattagtatggcatcctgttcatgtccatcctcagagtggcagagggcatcaatggatctaatagatttttaaagcaaacagaatttgagcctagggctacattgtccttcacccaggtcttggtagcagcaaggccatggctgcaaaactgtcatattcctacttcctgtggtacagggtgcctgggaagtgaggcattgattgagtttttaaggaaaccacttctaagggacaagacatccccgtctttctggttggaggtagtcttgagttgctggtagagcttcccagggtatccagagtgtccagggtgtctggggcagcctgtctccatcctgtatgctccttggggccatatcagctgcctggaggtgtttagtctgggacatgcacagccaggtgccaccaccacaggtggacatctcaatttgtgctgtctgtccttgttctgtttctctcactgagttctaaaatggataatctgtcacacggagatgagggcaggccagccacacaaaggaactccgagtttggcctgcaatgtgaaaactgtcaattatcctattttatatcctgcctccgtttccaggagcggggtccttgcttccattagaccaatttggagcgatgctccatgatctaatccttttaccatcttatctgaacaagagaaacgagtgtaaatgaaggggggaggagctgcagggagggaacgaggggacacaggaagaaaagaaaatgatcattttctagggtcatttttaacgcctgactatataatttattaaaagtgaacgtgacattaaagtgagtgccagtcagtggtgtgcggggcggggcgaggggggaggggtgatcagagtctaaagacacccatttctaaagccctccctccctgtaggttcagaatccttacctctgcacgaggacatcaaggttatctgtggttttcttgagcatcactgagcagggttcagaggagagatggttcaggtgcaaggaatcagggcctctaagtggcagcaccaaggggcaatgggagagccagccctgtcacacagcacaggggatgactctcttctgccaggccagcactcacagcttctgaaagcaccatgtgttagtctctgtggatgcacagcaaattgccacacagttagaggcttaaaatacccagcacttaggatgttctcctgggtcaggactgcagacaccacttgacttcttagttctagcttgggtctcacaaggcttccagttttctccacaactgtaactgaatatcatggactatgtaactgattttttttaaatgggtctttctttctttctttctttctttctttctttctttctttctttttttcttttctttctttctttttttaattttgacttgtagttttgaaggctaggaagttcaagatcttgaagccacacctggtcttgtctttcctgctggtttggggtgtacagggtccgaaagggcattagatgctgaccagaaccttctagataagctcttgcttcctttggcttattcagccagtctcataggattggggctccacttttatggcttcacttaatctgtgtgtgtgtgtgtgtgtgtgtgtgtgtgtgtgtgtgtgtgtgtgtttgaatacacacatgtgtatatatgttctgtgtgaatgcctggtgcctgtgaggttcagaagagtgtggtcaaattccctggaactggaattatagatggttttaagctacgatgtgcccaggtcctcttcgagaacagcaaatgctctcaacctctgagccatccctttagccttttttttttttttttcatggactttggggatcaaattcaggccatcaagcttgtaaggacagcactttatcaaaggggctgtagccttttatttaacagaaaccgcctcccaaagtccctgcttctaagcatcatagacaggtggggcttctccctcttgctaattcactgtggggttcagtccaagtcagtggggacagtgatgccatagcatcaggtcccatctggaggtgtgaccggggaacattaggccaccttgagaacttattcccaggggctgtgtgccttctgagcctcctctttctatgtactacaagctggaggccactttatttcttgctttgccaagacttccagaagagttgtagctctggccttttgtaatggccagcaatggcagaggaggtggctgtgaactatattttatgggttagaagaaagctccaggtcccccaacatctaaagagaggcacttccatgggcctataaagagtggaaacaggggatcactgacacaaggagaacactcaccaccacccccatttgcagactccattattgtcttcatcaagtgaccatcgtcactctagtatcagaagttcacatccgggccaactccctagtcaacacttggccaccataagatcagataggccttcaaaaatgcctctgactaatgttaaagagaaataaaaatgttctccgaggtgtagcatgaattctaattgttattaataataacaactcagagtcagctaccagggtgtgaaagctggaagatcggataagcaaagtagccagccactagagttctcacctctaccaatgctcagaccaaaggcgccatcctgttctcagactgaatgggttgactgcttcacacagctgctcagactgcactgaggtccagtctccttctgccttatatttctctctctgcctggccatatcccttcctgtctccacctcctttgtgctgggattaaaggcgtgtcactccaagtgctggatcaattttgcatggcccagagtgaccttaaactagaagaaatctgtctgcctctgtctcccgagtgctgggattaaaggtgtgtgccaccactgcctggcctctatggccaactagtgtggctagctttgccctctgatcttcaagcaagctttatttgttagatcataaacaaaatatcaccacaccaaggattccatcatggtacctctgactggaaggaggtggtgaggagatgttgaagggttaggttcttcatccctccacccctccaccaccaaacaaaccagacccaggccatgctcacgtgctagattctatatataattctggtgcatggccaaaggttaattaatgccttagccatctgacaagaagccaagatctacaaaggagttaaagatcctagggtattgagtgtgagtttttctctgccaccaaacaggtggctaagctgctcttggcttgttggtgtgagcaagctttgcatttgggagtccagcataaagggagctctgcctattgtagccagccttgcgttataagcaaatcaaactaagtaacagctttgtggctgccagaatgaaaaaggttctgagcaaccacccacttccctacctggccatctagggagactacagtcactcaacacgacataattccagttaacttcttggaatgctaatctcaaagcagttcattttgcttaagcaccttttcctcattaactcccaagagtgcctggggtgttggaaatagagtggtggagataatgtcaccagaggtgtgaaggtcattttgtgaaagaactttacaatggggcctttctttcctgaagttgaagtccgggcactagacacacccggctgccagtctgaaagaattgattggctacagcagagtcagagggtgatttcagcttacagagacaggtgaaatctacctcaaagttacatgctatttcaaaacaacactggggtaggcatgaatttgcttgttgaatgcatagcttatattcaggacaggtctatgcagtttctgtggcatcaaaaaaaaaaaaaaaaaagctgaggtttaacttgctgagttactaagttctgtgaagagagaaggttggaagtcagaatctcagctactaaaatctattcagagggttaatcactgtgaggggctgggtcagatggcaaactatgcagagtcatgaaaggaggaaggatccaagacccaggaagtaaatacaatctccaactttcagggaatagacattgaagatccgcaaagctcctatgcacagtcctggaagcaggaacagttgctggggaaggggcatcttgctaactgaactgcctggaagttgtaaaagaccgtccagggatgcagagtgtatgagttgtcatctgggctaaggtgggctctttgatgatacggctgctttggggttgtccacactcgctcatggtctgtgagtaagcccaataaactcatcagtcctccacactggacttttgtggactcattcattactctgtcattggtgccctatattgggttagtagacatttgtctcatctccccaggaaaagtcacacaacaggtgccaacctctctgacaagatgatgaaatacccacggttgcaaaatttctatgagctcttattaaaatccctaacaggtaaaaaaaaaatctgtgtgaataaagacagaagggagggaactgacaagagtatgggagagagatgtgggaatatcaccataccaaggatgcagagttctgtctgggagccaccctgttgaggatgacaggcaaagcaggcaggcagcatgccacagcctggagaaggggggagacagagtgagctctgtgtcctcatgactgcaggggtggtatttcagagaacagaacagaaagtcgaggctgattaaaatagagaaaaaatatggagaatatgttgcctctaaaatgagaagataatacataagagaaatgaacagagagtaagatcttgggatttgagattatggtggttaaaataaaaacctctatagaaagttcaatagatgaatctgtacaaatgtctcagaaaagacttttttttcaagtagaaggaaatataagagagttattgaagtaaagactagtgaaaatagaagccagtatctgtcaaagacttaataaaagagaattttcccagttcttcaaatgaaaaaagataccaagtgttatgtataatgattcagatttcttagcacgaggaacttgagagcattaaaaacaaagaagaggatgagaaaaccttgtaggaaaaagcccagaaataagaattctactggcacagagcttcttggagatgctggcagttagaagacagtggaccgatgccataaacatttagaagctaaatattttgagactagattgaggcacccaggcaaaacttcaggatggtgccagaatggagattctgacagatgcgagccccttgtgctctttggaagaataaaaacacaagactgtaagccgacaatggaagcagttatgccaaagaggaggaaaacatgaaaagcaagaggaaagtgaactctgcctgaagatggctgtgagcagtcccagacagcaacctgtctaggctggagcaagatgaggaaacctgaggtaatttttagaaacaagagaagtttgtagaaataagaacatagcacggagagctcagaaggcaggggagagatcaggaaaccgaaagggaagaatggctggttcaaatcacttccggggacactgagcaccaatgaaggtacaggactgccccaaaggactcgcagaccccattccaccagctgtgtctgctatgacatcctgtatacaagccctgatatactgtaggaatcacacggggtgtaataaaaatgagggggctcgtgggaacatgcttgccactgaaaaccatagaactctgactggggacaggtcaaacacagctaatgtctaagaaagtgccgtctcctccagcatggcagttagaatctgtgtctgtccttacgccctgggactgcttcctttttgtaaacagtgatagctaattgtgatcatcatctgattggatcctgaaaacctgaggcaccactgtggcatgccttggagtatttctgtgaggatacagccagaaaggtttaactcaccctgaatctgggcagcgccatcctttgatatggggtcctggactggacagaaaaagagcagtgagaggaatgctggcatcccctctctctctccttcctgtcttgcctggatgtgagcaggaagcctcatactcccgctgccacagccacgagcccctcctgccactgtactttccctaccagtatggaatgtacccctaaaatatgagccgaaataaacccccttcccccttaagttgcttcttgttagatacactgtcagtgcaagagaagtgatcgacacagatgttagctttgaagaagtattcatctaatataaacacagtgacaatatctattgtttttttgtttgacaaatattgattgtgtaattttagagtacaatgtagtggttttggtgtgtttatttatgagatgattaaatcaaactgagaaacacgtctgtcccctgacacgctcattttctgtatgtgatgagtatatttacaacctaggttttaggcccttttgagatgtacaaagtattgctattaattgtgctactaggggaaattctttcacagcagcagagtatccctttgcatcaccagaagctcctaacaccatcatcttgcaggcagatgggcactccaatggtgctgccctgcagcggtcatcctagcctgaggaagccggccagccagcctagcttacttggcaaaccccatacccgtgggagatcctgtctcaaactcaatatttttgaacagctcctaagtaacaacacccaaggtcaacctttgcccaccttgctcatgtacatgagagatgcattctcctccactataaaatgtctgaatatcagtgcttgcctgaagagtgtttgaagaagccagtctttggtgtcccctgaaaactcccacagtctctgcacagcaaagccttccacatacatgtacttcatgcaagaaaatcagtatgacttctaggcagaggcagcttccaaaataaatgttcccagttgccctttcaaagtattgacccccacagctttctcactggagatctggaattgttgttcctctttgggtgacccacccacgcttcctacttgctttatattctccttgttccttgctgagagtaaggttggattgagagacggtgtagattattaatggacatctggtatggtttgagtgtgtctccctaaatgccacatggcgaacacttcctctcctaatttgtgtgtcattgcatttggaaatggggtctctgggagttgattgggttgaggtgaaggtcctgaggagtaggcatcttagtcactttctgttgctgtgataaaacaccaggaccaagacaacttatggaagggtttgcttgggcttacggttccagaggtagagtccttcatggcccaggagcaggcagcaggcagcaggaatggtgacgagagcagcagctaggggctcacatcatgaacctagaccaggaaacaaagagagtaaaccgggggtgccatgggtcgcctccagtgacacccttcctcctccagcaaggccacacctcctaagccacccaagcagcaccatcccttggagaccaagcattcaaatgcctgagactatggagggcacgtctcactgagactatcccagtggggctccctggatagcattaggagaagagccctgagctacataaacctgtttcctctccaagtgtgatgcaacagagaggctcccagcaggtactggcaatacgcttttgggtatcccagcttcgagaacagtgagaaataaacctttgtcctaacagatgaccacatcagcagcccagcctccaacagcaaacatcaggctaagaccagctgacagactaggattcgatgttctctggaggtgaagaatgttctggaacattccctagttccgtcagatgagagctaaaagccagccagggaatggataaatgtcatgttttctggctcctgaggccccacgagcaagagaaagctcacctcccttccagacagatctctctgtctctctgaggaaggggaaggggcgcgctgtgagtcaatgtgtaagcttcagagaagcctaggaacaaatatgcacttcttaacaaatattccatttacccagaagtgctcagctgcctgcggggaacaggctctccactgacccagataagcaggccagggccctgtgatgttggcatgtggtacttcaaggtgcctctcaccacaggccacccggagtctggatggccccgtccaaacacaaacacaccggcgatggtgctcccacctgcacagacgtgagcacaaaggagattttcagctaataagatccttggtgtttgtagcactaaagcagctaaggtcattagaactcatctttaaatacattttcccctgttctggcagaatgaaaactaggttgaaggagctcattttatttcccatttaagttaattcaatgggaggcagactttttaaaacattttctttatgtgtgtgcagagaggagggtggaggcctgggggaaggagagattgagatgtccctatgggtcccttggctaaagaagaaaaatgtcgggcttgaaatgctttcctctgggggctgtttgtggaatcaaaacgcctctctggtttgcagttctgaaacccaccactgtgaccaaaaaaaaaaaaaaaaaaaaaaaaaaagaaagaaagaaagaaagaaagaaaaccactttcaatttagagggggaaaatgcccacagtcctggagtcctgtctgtgctgagggaaatgccgctggaggatgtgaacacccagggtttgggttttactcgcggcccagatctcagcacccgccagcatccttgggttgtcccactgatcttgtctgagagctgagccccacctctgtcccccaggggaagaagactgaccacagggcgttgctgggaggcatagatggaagagaaggacaaagaggccagtccctggatgcagggacgacctcagtgttctcttgggatcacctgtgatccagaggatcaaagttgcatcctcagatactcccgccctctcttgctttgtcaacatttttctcctggggatgctcagggctttgaagggtgttccggttaaatctctatttacagccccatcaggagcagaccttcgaataaatgatgcagttccttcttccgtctagtccacaggttcctgtgtgcactttctttgcttagaggccaccctaagacctgctctgtttatgtgctttcaagtggttgcctactgcatcattaattcattccacaagcaactattgaggccttgttatactccaggagcttggatgaccagtccctctctacctcgtctagtatgagaagatttatagcctccaccagaagagcacataagcaaactctttgctgtgatgggatggcactgtgggagaaggcgtgacaaaggagaaggttaggggcagagtggggaatgcgtagcttgtcgctgaggaggggacatggacagagactgcatggaggcgaaggactcatcagaacagagacagagttggcatctctacgcagagggagaggccatgcacatggttctgaattggggtggggacatctgggctattcaagggacagcaatgaggccagggtgaccacatcagagtgtgcacaggtggctaagattaaaatgtgactgaaaacctgtaggttactggtggccactgtcaaggtgtcagcttttcttctggaagagaagaaagggaagttctgttgtgactgcagtgagacttttcccaaggaaagggaggtagagaggaggaagaggaggaggaggagagggaggaggaagagggagaccggggcctgcagtggggcagcagagatggaggccgagaagaatggtcagtttctatgcctcgtcattaataggagtgacagtgagtggtgtcccgggagtctaagcaaggggagcacgtagttgatagagtttggaggtagagccaagacaccagttgttggtgacgtgttggagatagcccagactctaggattctgaaatacagaacagtgggttcctcataacctggatagaatagagaatattcagagatctttggtttgtttcagggtatgctgagtcagatatgtatggcatataactaagtggacattcttattggtttgttttccaagacagggtcccactgtgcagctcttgctagcctgaactcactatatataccaagctggcctccaacgcacaagtaatcctgtctctgccttcccagtgtgtggttacaaatatgtgatgttatgtccagcacccaagcagagacgaggaggatatggttagagtcttaatttctagggggtgtgtgtgagcttcatacatacattaagggtttatttttgtccatatgatactgaaataccatcacactgaatgaacaatgatggagaagagtctgggatgcctaagactctgaagcagttcagtgggaagaggagaaccggctgcaagggctgcaatagcagacctgagcagtgttcagaagcactttgtggggtggagatgaaggtccctgtcagcggtttgggtattagagagttgcagaatgctttatagtaatatggaggtcatcggtgacgtggtcatgggcagctttggaggagtggtagagagaaatgcccagctggattggggctaggaaaaaatgaaaggagagaaatggctaataatatagaaaaggcctttgaagggttttactgcaaaggaggtcaaagagttggagcatcaaccagcagaagaaatagggctatgggagtgtctgggcttggggcttactttgagttggtctggtttaggttttccataggaaaactatagcaataagcagaacgtctgggggatatctgccgtggacccagcatagagctaggtgctggaggagaactagaaaccaaagctctcaagggtttttaccatgtaggtagaaatcatgtagaaaagagaaccagggagctatgggtatctccagtaggcggacatgtaaataggagtgaaagtgagtgaggtcacgggagtgaagacaaagggagaatggggtgacagaatgtagttcagggatagtgtggactaattaactaataaacgcttatggcatgggcacctgattaagttatggacaatagcagagtctctggacagttttcttcagtccatctgcagctttgtcacctcagtgatgaaatcttaattctgacgacgtctcttgagcacctctggtgtgcaagaagccatttgggttacaaagatgtctgaaaccatcgctgctcttcatagtcttctagaagagcctaacaaagacatcagtgatatggagggtgctgtcaaatgcggtcatgtagctggagacacagcaaagcagaagcctgtcttctattccttccctctgttctaagctgggccttcaacctcacctttcccctcagttaacatgagggaaaggattttcaaaagcaccaagtatttctaggagtttctttttctcttgagtttcttgtagacacagtctaagtcagtgtgaaggagggggggccttgtgagaggtggagtctggagtggaatctgcagcatatccagagccattctggaccactctgcttcttccatcactctgaccacagtagccctgaagctggagagctgacagcagttctcctcagccctctggcttctccactgtggtgggagaagacaggacctctctctctctctctccctctctctctctctctctctctctctctctctcctctctctctctctctctctctctctctctctctctctctctctctctggctggaaagttaaggaggtaaggcatggctgtggttttttcctttgtctctgatctttcaccacctagaacccagagctgtgtctccttggtgattccaaagccaatcaagttgacagtgaagactgactgtcatatgaagtaccccagagagccaatccattggtaaaccagaagaaagtccttgttaaagatgaacctagagcaaagtgtttggattacaagcacagaggtctcagagttccagcctggggtgagactcactatccacacacacttagagcgtctgtggactgaggatagccataagcaaagaggatagaggaattctctagcaatcagattggacaggaggctacagaagaaacagatccaggttgcatgtgagtcctccctccatcaccacagccaagaaggaaccccaggagtttgacagccccatctacctcagaacccctgtgaactcttgcctccagctggtctcttctcactttaaacattttgataagacattcattgtggctgccactgtcaacaacacttttaactgctaccttctttattcagggaacaactttaggagagtgttctactggtgtccccaaacctactgttggaattctaataacattgtttgacaagcaaaagcagtaagtgggagaagtgagtgatggaattagatgctaaaggatcataggggaatagacagtggactgtccccacagtcattatttgtttgtttacttaacttcaacatcctccccagagctgcaacgacaaaacctgctttagcttctcaaacatgaaacactgggtaagacacatgtcaaatgaaaatagcctttttagtcatagttgatatttgtaaagaatttggcattcagactctgtcaaattcaactgcctacttctggtttggtttatttttgtttgggggtttgagacaacgtccccgtgatcactctgttgcaaacatcagtcatgaccgtaggatccgcctccccagcacagctggtagatgtgtttctagccttgaaggaaagagacatttatatttcccatcttcagaatcttctgcttcccacactggtcagttttcaggcagccatttttaacaggagtccaacggcaaagttttgctttggttccttgttgactctgtccctcttgctgttgactcagggtcttgattgacatctttatctctgtttgttctttcttggccagactcctgtgtaatacagactgggagggatgctgggaggccgctgtaacagtccaggagagatgacaggactggagccaattgctgagcatggcaatggatagatggatggaaaagggactgcacatggcaacaagcttggacaccaggtggtcgatgagggttctctcatgtgtgggaggagatgtagctccttgttgaacctgttgggttgaagtcacttcttctaggacattcaagtagagattcaacagacaggtgctggtgtaactctagggttcagggatggaactaatcaaggaacaaaaaatgtctcttcaacacgtatcctcacatttgatgaagtgttaaccaatgccatctcagtcaccaaagaaatgctccagggttttatttcactccatcgtcaaattccaccgttggtctgctaaccatgagaggtaacagcacccatctgcatgaatcatactggaattgagaacgagagcctgtgaaagtgacatcaaaggaggaacctgggctgcccagtgctgcgcctggctcagtagctcctgttctttcacacagccctgtggcagaacccggtgacctgaagttcccagaggaagtcatagatggtgatttcagcaactagccacaatgaactttctgcacagataacagatgatcatgggggctctggcccagagtgcctgtggtagagtcatgagctagtaccagtatccttggaaagatggtgaaatggtcctggcaggtgggctgggctgggaatgagagcttgccaagtgtgtgtcatgttggtgtgcgggtgcccagtgtggtacttttctgtgccccagaggatctgatgtgctgggaagctggacacctctgtgttgactcctttcccaagtcatggcactgtgacagctgagaacccagacttccccctatttccagccaaaccaagttcaggctcactctgccttctatctctcagagctccgttaccagctgccactctgcctcaaaggcagcatctagttgccctgacgtacagaggaatagtgaaaaacctacctagagacaaagggcagagcacataagctgacatggggcacagggttgacccatgggagaagcgggaacttccttctagaagctaggagaccccacatgatgagagcattggtcacaatcattgtagttgttgctcagcatcatttagcaagattgtggaaacttgatatgcgaagaaggcttgaaggcaatgtgagaaaaatgtgagttcgtcacagtccacagtgtctgctgtttagtcagttctcaagacacggtagctggagtgggagataaagacatgatcaatcaagatcacactttagacccatgttaaatcccagtgttctctttcactagctccaagacatgcagcaacttattgccgtttcagagcagcagtcctagtctctaaaactgggcttaacaatatctaagctacttggctattgtgggttttaagaccagataatgttaagaaatggctttaatttacagtagcatttgtattatgtttatgaacaaaggactcatttcacacttcatgtgcccagagaaaacactctctggtagactaaaagcaacttccaattgggctatactcagatctttagattgtagtgaatctaagcaacatatcaaccaacacaaaggtcggccaatcttgtccttagaaggccacagaagaacataggcactgtggaccatacagttgtcccacccaaccaacttttccatcacagagtcaaaattagtcatgggcagtctgtgaaagatgagggtgtcgccatgttccatacaaactgtgtttacaaaaacaggttgtcgtgtactaaatttaacccacagccagaccgggctgattgttattgcactgacctcacatgttgctgattgctgatggggatgcgattggaaaagccaaagaggatgagcgagcaccatgcacgcccttcacaaagaggcaaggagcagtgagcccactcttagaaaatcattccctcaaatatgatattgatctatgggaaaaaggaaagctcctcccccaaatgtggtagagaagctttaagctttgagctggcacattctgtgctttcctgctcagtggacttgtggacttgatatagtgggaggctgccggaagggagagaatgaaagacagggaaaggaagagcgcgtcaggctagacgttgcctctggttttctaatctcgcatcttcccttctgcactgacttgaagttctggaagcggcaggttcaaggtcgggttagccatgtggtcaagatttggtgatagctttccttggctttcttatggtctgtttcttactatgtcttcatggtgtaggagcaatatcattcttttccagtaaggacactaatctcctcctgagggccacacccttacagtgtaaggtaatggtggtaactggaattacctgccaaatgtctcatccctaaatttctatcacagggggttagggtgacaagtagaaaatttaaaggcacaaaaacatttggtctgtaaagtaggccaaccactgtgagaaacagaaatgcccctggatttccggagctattgcaacaccttgtccatcacactaaggaaagtattgtattcttttgaggcgtcatttctaccagtgcccctgcctgtgtgggaaaaccatttcacctgtgtgggaagcccatcacccaccactgttgagaagtattgagatgcccaccactctcgtgctgcctcttctccaaggagaacttgtgaacttgaacctgatttacttatctcttctcctcatgtcatcatgcctgggacattcaagcccagatattcaaggatgtgatgatctcttgacacaaaacgccttgtaccgggttccagaaagacatcctacactattaaccaccagaagaaaaccaagcctcagaagtgtgggaagtccccaggaaaatttagggctgtcatgaggaagagtgcaaagataatctttatggaaaatcagtaattcattgtatttgtgttgcatctgttcatgtttttcttgactgtatgggtgtgtacgaatcatctccatgatgacagatgtggaaaccagaattgagagagtaaataaccccttcaggtcacactgccaactaaaggtcattctcaggctagagtcacgctttgtaagtagacatcactttgtccttgtgttcagatgctcgtccttcacacccctggcctgccagccacagtcactgtggattcatactaccttgtgcgtggccatggcccttaggacccagggttcttccgaggtgcttcagctgtctgagtatagtcagtgggcaaaatgccagtgctgggagctccgccctcccgctcgtgccctctgcgaggccccttcctccctcacctagtgcagagccaacacactcccagtaaattcagtgtttttccatcccagtgagctcagccttgactgtgatttgggtgcaagcagctgcaggtgcctcaagtcatcaagtactctctcccccaccctctctgcaatgccatccatgtttgctcgctgctctggactttagatgctgtcagcttgccaatagcctgggccgccaggcaccacagctgacagttgaatctgtggtgctgaatccttcttctggaggaaaaaaaaaaaggctaaagaggttaatacactcaagtcaggataaacacaccagctgttagagtttctgatatttaatatcattatcaagtaaataactctagaacacacttctacacacatgtcctgcagaatccacactgcttcatttacagtgtttagagagaatattaataaagtatcctaaaagctaccacaacggagtaatgagtaatggccgattagacacatttgcatacatcctgctgtccatcccagcctgagacaccgtccctgaagagttcaggagtgaggagttagggagcacaggagggaagaacagggaccgtcctccacctcgtctccctcgagtaaggctttagatcccaaaagccctgcacttattttccgtggcagacccctgcatcaaaaactacaccatacatttttctacctatccaacacaagaaaggtttattttatttaaaaaacatatatccagacaccactgtagtcttcgggactggttttgtgatcatggatataaaccatgttgtgctcttgcaggtttgacttacctcgtgtctgctatcagccccagccccccaggtgtgtttctcttgtgattctagcttctgatcaatcctgctaagactgcagaattggagtggctcattaagtgtgttagaaaatcactggtgacttttccttcccaaatccctggctacagtccatctgggctaacggaacagaaaaatggtcctcaccacatttggtggtggtggggaacgtggaataatgttttttaaagatccaacaaatttttttccaggtcacaaagcatctagcaaaatgagcttagagatactttatgctgactgtcaccatggaagctgctctcaggacagcactcgggttccacaagctttttttttttttctttttagataaagccttcattgcaaggggccagggttgagctatttcccttctcatccagcaaaagcctggcatccggtttgtctgtccagatgtatttttgtttgggtttttacaccattcgactgagatcaagtcatgaatgtctgctctctggatgggcagaggaacaacgatttatgaagtctgaggatgcatgtagtttagctcaaaagcacagccagatgagcttggtgagaggaaatgccgcacggtgtgaccacagcacgcccatatttggggcaactgctcttcggcaaacttttgaaaacctgaacaggagggtatggttttaatagtctctcgtacccggggctgtacgggtgggatgcatcagatgagagaaacggcggtcattaaaaatgggcttcattctaataagacatgcagagcattccagctggcctcctgtttgttaacagggaaacggggatgggagatggctggcctgtctctatgctttctttccagttagtggcagaggggtagacacggctccacttctgtccacacctctgctgttgggcctccttgaatgtccaaatggctcagtacccgctttgctcagtgccaagtcaggttcctgggttctacaaacaagatttccgagagcacagaaaacataaataagtggtcagaggtgagacaggagacgagtcagggagactgagagggatgaagaggtgtctcagagctttgctgtgggggagacagtgggggagacggttagcaggtggtggcggtggagcagaagaacaagcctatgtctaaaccaagagttcactgaagtttgcactgttctatgtctctttcttttccagtaaagccaaaactacgattagagtctcggggacaaagggggatgggggtgggagtgagaagtgggaaaagggagagagagggggagaaggaggaacggatgggaagaaggaaatgggagaggaaaggagtgaggaaagatgtgaaaagttggctctgggtgggacccaggtctgtgctgtctggaggggagcccaccaagcgtgctttgccctgtgcatccccagctcatactctcattctctctgatgaagcctctgagactacaagccctctgctttgcctcccttggccccaggccacatgcctccgccttgctgtctctgatggaaagaaaaatgcacctctaatcatagctgccccagcatcttgggtcatcctcttaaattcccactcatgtctgttgaatgagcagatgaaaatgaaagaactgggcagctaatggggatacgtaagtgctagtgtaaagcccagaggccccccagacttcactcagttacaaccaagtattgatgcaaccactggctaacaatagtagatatatgtaaatagtagatatatgtgtaagaacaagataaacaacggtgtccatggccattctccagagattcctttctgttgtaacatcagacgctactatggcaacatggaataagttagatgctattaggctgtggagaagctgggtgaggctttatttatttattttgtatgtgtgtgcatgtaggcttacttgctcatatgtgcttgtcatgtgtgtgtatgtggagttcagagaaaaactggcaggagtcagttctctgacctccacatgccagaggggttccaggaattgaactcaggtcatcaggcttgactccttcatcctttgagccttctcacgagcccatatttgattttaataatatgtttattaaatttaatatataaaatatatacctattaatataaacacacatgcatatatatatatatatatatatatataaacatatatatgtgtttgtgttatttaaaacaggggctgagactcagtgggtaaagtgcactgattgctctgattggaaggtcatggggcattgactgagatgactctactgaccaggtcagctgggaaaacaggaatctaacaggagcccttcatttttatctacctgttatttcttcccactcttagcacctggctctatacccaggagacccttggaaaatgaggagactgactgtccacttccctgatggggacacaggagtccagagactggatgccacttactcagggcagctcagcaatgccactgatgtcctccatccactcaggctctgactagcaggaagcaggtaaaaggagtcaaggtcagaactgggcaagaaaaaccccactagttagtgcttctcctctgccctccggacaggtcacagaggctgaatacaaggtgctcagcagctcatttcacagtcctcaagggagggggagtgctggggtgacaactccatggggtgaagtacctgcttggtaagcatgaagacttgagtgcaattcccatcatcgacataaaagtctgagcatggtggtgccccacctgcaatcccagtgctggagatacagaaccaaggattctctggtgctcacaggccagccatagtgactagtctgtgttccaagctcagtgagcgactctgtctcaaagaaaaagaaagaaatacagtatcctaggacattgacttctaacctgcaccacatacatgcgcgcgcgcgcacacacacacacacacacacacacacacacacacacacacacacacacacacagaggattaattagcatgagaccctagaagaatttcttcctaagatgctgatttaacaaacagaatcatgagtaggtttccctatgactttcagtctcctagaaggattttactctagaattacaaatgtcttctgctccctgcaggggagtctcactccttaattcccacctccatcaggggaagaactcactctcagttcccagcctccctccagtgagagtgccatgtgttatttatgtgacttgttcttttcacacaacattttaccctccttgtggcaggaggcagcttccccaaactgctgcgagtgttcctcgttggtatattttattcatacggatcagttattggaccactccttcctgcaagagctggaatttgcccttgaggcatcagatggagtagtcagactgtcaaatgtgtcccctaattgaagtgaacatcagcacagtatttgtcaagtggaaataaacagctctggtgaaggaagtagcaagtttgtcaccttcctgggactccttcgagtcttcctggagtttggatcattcttaggcatcggatgtctgagaccagggaatggcttgcctggggcaaccagtggggcagtctgcacaatttatttacaaaccacctgttgtcttttcctctttgtccttttggggagtcttgtcttccaacaaccaaggtcccaacggcaacctgtttaccatgccctgcaagccctccctcttgttggcatgcctgctccactctcggagtctacagaacaaataatgttcccagtagctccaggcccctcaaaagtcaccagggctggtgctacaataccatctgctctcctggggctctctctctgaagacagctcccttcctgcacctgtcagctctctgcagatagtgctgcttgtggcatcctttgctcatgttccctgcaaccccatagatgcttctgtgtgaaagtctctccccacagtgtctttccttccccacttacctgttttcacagatcctacgagaaccttagttctggtggcttctgtgccttcattcttcatgtcttcacagagctcaatcacccagctgtgttgcttcctgccattgtccccggacctcccttcctgagattccattcttgttctctaattcaggcctcgtcagtgtgtagcatctcaatttacccctttgtccccttggttttgcatatttcaatctggtaaatattcttccaagcacccatttttttcaagttccatctgaattaaacctctttaacatctcctattaatcctgccacttggggtgtttcaagagacccactgagtctattcttctcggagaaggttcactgctgcagaacagcccagtgtcttccctgcctgagcatggaagacatagacttcaaatgtctctttccctctttctcctctttactgccgatttcttgaagtaagtttcctcttttggcgggtttggcaaacgttaccaagcctaccaagcctaccaacccaggtcaaggtcaatgacttggtgttcatgaagattccgatagcgctgatatgtgcatccattattggacatctgctgaatgccagccatgctcccaggcattgaggatgcagagatgaactctgtcaaggtccccgctctagtggagttgacacaagggggggagagaaataaaataatacaagcacacaagtgagatagcttggggcagatatgagcagccactcaatcccagggactcctttcatggacgagaaagggtctcaaagagtctcggtgtgtcttccctgggatgacttagtgacagaatggcagagcctggatccaaggtcacatcatctgtgttctttcctctacctaccctgcttgtttctagaacagtaaacccctcaaggtcaggcggcatgctccccaaaccttgccctgggttgctgagacaggcaggagcatcgtcctagatgtacactatgtagcatcccttatgtttctaaagatggtcactagcactccagggttcattcagacatgccacctcagagtctggggttaataaagacactgtcatgaagtaatggcttttattttccactaaatttgtctttcttgtggcaaattctatcacttggacaatgactatgacctagggggagctcagtgtccagccagcttcctcctcctgacggtgacaggagcagacttcccagcaagagcaagtcttgctgggaagagttgcagcagtgctttgaggatgttgtggcttgagactagccacaaaatcagcatatctgtcctctgggaggagagaccatactaagggatgggaaaatgatgagggctaccccaacttcctattgatggacccttaaggctgaacaattggctatcttcaaggaaaacaagatactgaaatctcatttgaaatagtctccctcagacctaagtaatacttgtctttttaccacctcttcacgcattctatattggtgattacgatttggctcagaaaaacctgtggcacgagatggcaccctcctccctccccaccaactctgatctccctttaaattattttccatttagaataaatcctatagcgtggcacaaaactttttattgaatagctcatttgagcagaggatacttttgaaagaatattagtaaactctttcaatgaagtcaaaacaccaaaatggaaaattcaagttttgaagagagccattaagtgtgattaaaacctctaaaaaggagagaacaacgcccacggaactctatttagccatttcatgtctttaattgtccaaagatttactttaaaagcacggacatgaaaggatgctgaatgttacagtatttagaggggggagtgaagacagggcccgttcaccagcaaatggagcttagcccagaagtggagacaacaaaagcggcaggaacctgcttccttctacaatgtagggagagagggggcataaaaaggcagcaattcttgacttcgctttgagaagcacaatgggcgtgattagggatccggagcgcaagagcaaggcagtagcaggagcatccacccgctggctggtaattaggacgaaaccgaggggaagaagcggagaagagggagatggagactgggtttgcagagagggatttgagaggtagtttttgaattcgagaacagataaagatcaccacaggagcaatattttttttaaccatgtaccatcttcaacaagatcataattcattagatgaaaggtagagatctccaggtttaaatcttccccaagctggtgctgcaatggcccttgggccagagggtgtgtgaaggaaggagagaagagctcagtcagaaaccgaaagaagaacgccgcttgagagggggagagtgagaccttcccaatgttctgacaagggccgctgcctgcctttctgtccctttcctgcaaatgcacaggtgagccagggaggaagaccatggcgcagcgggtcatgaggcacatcactgcagtgaatccctcttggaaaagagggctggagaaatgtaagcaaaagcagaaaggtagaggacggaaaaggaagtggcaggttattcaggttgttccaggcagtcacagttattcccaagcggaagtgaagaaggtgatgctataatgtgcgtccatgaatgtaaagactgtttttaaaacaagcagaagtcgtgtcttgcggaagattctgatgaagcagaagtggatggaagttgattgttcatggttagctggagcccgtggttcccgagaaaacacctctgtgatttccagttctgtgctgctctgcgtgacagtgaggccctaaggagtgatggccaccagccccaagtgacagctccccaacagctaagcatgtcttttgcataagagagatctggactccagaattcagctgtgtttttagattctcaattctggccatcccactcaaattacagtcactcagtatgtgtgtggtgatatggatccatgatctatactttaagaggtcagctatgccattcacattcatggatttgttgagcatgtgtgtgtcacatgactgtgaacacatgtggcagaagttaattgaccagtggcagacataaatgtccgtgataacggggatgtcacctcagagagtcctaccttgctttgtcatagactctagagggcaatgagatgcacaggagtagatagaatgccagggtcagagggaaggttgagctgcactgggaactcccagggctccaaaaacccatttcccttcgactacaagtgctggtccctttcattctcagagtgacccaactctgaggcaatgggatcctccaggcttatccgtagacaggttcaacagggttaagtcagatgccaaggcaggatgacaacccaagtttgggtgacatcagaggtcaggatgtttctcctaatcctatcactcacctcatatggggatgcttggggttagggaagacatttataacaccatcctgggagcccccaataaaaccaagtagatgtgagctatacacaccaaatcttgatgactgatatatgaatgtatagaaacttttcgtttagcctttcctctcatgcttggctggggcaagatttacttcccctctgtggctgcaattcaagccaccaagcagagttggctgctgtgtttgtttgattgattgtagctgaggctggtttggaacttgctatgtggtccctacactgcctggtcccttcctaactgcctccaccttcaaggtaatgagattgtaagtgtgccagctacgtcttacttctcctgacaaaatcagtgtaatacaagaaggctttgttttgtctcacagttctggagtactgtccatcatggcagggaagggatagagggcaggagcataggcagtcagaaagcagagatagatgaacgcctgtactcagctcacttcattcttttgacaaaatctcacctctcagcctaggggatggtgctacgtacagtgggcagtccttcagtctcaagtaacccaacccaatcagcccacgacctcatctcccaggcgattctcacctggatctcatcaagttgacagttgagattaaccaacataatagatctgtgtttttttttaaggagaaagaattttcataaaaaaaaatctaaaatgtttcacttagggttttttaccggctgattctgcaatggctggctttcaaggattgctacttggggtcagcatgtcagtgaaaagcaggtctttgactcccagtctcctctacctcatctttgaagacttttgtgcactgggtaacatcagcaatgatgttcagctgcagctaaagcttcaagttctcctttcgtcgctcccagctttgaacttaaatacaaaactggggttctggactatggggttctatatccttttctttaaggtctcatttcttctattatacaaataacaaatagtaggaagtccagaaaatgaagacaataatacaatcctgaccacttaaggtaactgccttcactttggtactttctgctgccattcttggtcttcagatatccggatagcatgtgcactgtgtggtcttcagatatccggatagcattgcactgtgtagtcttcagatatccggatagcatgtgcactgtgtggtcttcagatatccagatagcattgcactgtgtagtcttcagatatccggatagcatgtgcactgtgtggtcttcagatacccggtttttctccctttctttcttttacatccctcaccttgatctttctttgttctaacctcagcccaccccgactccagttttctacctcccctgagtaaaaaggttccagggggactctgggactaaagaccttgcctaactccagctggttgtacctggtcttttttaggagtttggtgggtgcagtttgctgtggggacctcctatctcaagtctgctctgtcccctatggtccctggaagtaaactgatgtgggcaactagaaggaggagagtagaccctaaggcaaaaagataaagggtggcaggatggctcataaccgtgcgtgtgttacaaaaatcaacatgttagacatttccaccagatttggtggggccatgcttacctgcctatcagtcatcaaatgatgctggctggctacatgagggtggccctgagccatggcttcctgcagggagagagatgtctctctattttgttccccctctaagccccaaactcagttcagtggtattagaatacattctccatagaaattatttcattttaagaaagctgtgtgaatacagggaaggcaaccccgattcatggggccatttagctacacaaagcgcccctctagtgctgccttatacaaaagcaaagacaatgtttgaggtagaatgtgaggtgcctgacactcgacaataaagagattagctagagtttaccttaggaagcttctgccaaggcagttaatatacattcatctgggtgatacgcattttaagaggggccaactacatctatgggaaatctgagagtcagcgagggtgtctctcaagagggcaacattcatgaggacaaatgctcaaaagatgggaaggggagatatccaggggtcttccttgatgagaaaacattaccatctccacacactctaataaaggaaaattgcaatttacagtacttccccatggctcaatttctttggcaattattatattagagtggcacctctattgaattatatatttcaattactattaaaaaaaccagagtccttaagttcgtgccgattcagaatgcagcttctggagagttctacctttgacactccaaggatagcatcgtttatctccttagcactcggaagcccattatgtgtggcaggcaaggagggagccaccgcctgcacaatagtgttcaatattatcaaagcacttctggtggattcgaccatctccgtgctgtgtgttgtggcaaccccaggtgcccggctgcctttctttgcacaggacacaatggcaaatagaaacattaactctcacagtgttgcaagaatccaactgcattattccctgacctccaggaagataatgtgtcatttgctgtacaaaaataaaagttttcaaagcagttggaaatacaatggtactcttcacgtggggaactgctttttctagtgtttatttgtttggccttttggagggagagaatggaaggtttgcagggagacgagggctcaagttgcccgttccccttcctcttcccaagaggatggagaggcttctcatggctgcacggggaggggtggggagcaccaacagagcctgggacagagagaagccctgcttggtgtccgaaaacccctgggcagtgcttggggacatcttggtgggtggatatttactagaagtcaatagcacccgtgggcttcggttcaatgctaatgaggccaaggttatccaagggccagcgggttcccttctgttccctctgtgcagagcgcctctgtcagccgccaggcctctcacagatgcaggaggagggggcacagcgtgggcaggaagcttctcccagacagatggctccccagctgtttgtgccgatgggtaacttcggctgccaccgctcagctgccccactataggccctgtgtcctccaaagcctttcccttttggagtcctgtgagccacccctcaagcccagggcttcatgtgggatgtcgcgaggcatatagcttccgaccagctaggtgtcttccacaggagcctagagctgatacaatcaatggcaggtacgggagagttggatgggaattcagctcggcctttgtctttcaggtgacgctctcgtggtcatcttaccagtgtaatgggcacatcaatccttgcctttgtcccctcctggctttgtctgagatccaagcctggatggcttggtaaaacgtaaactagagttatgggccatcttgcttttattatgataccctccttggcctagtggctaccgtcacccatcatctgttgccagggaaacacattcttttattcagcattgcacctcagacccatttcacatcccagtcatttacccacatataaggcccttaagtttttgtctgtggaagacagggatgttttgagttccttcccctttttcttttgcaccccacacccactgccctcttcccatcataggagcagatctgatgcctggctctgtgaggtgagattccccagagacacggaagcacaggaatgtatgcatgtaggaatataaacatacatcataatatatgcacataactgacatataaacatacatcgtgatatatgcacataaccatattgtttgcttgaggggactggcctacattagggtgggcactgccgagttctaaatgtgtagcataggctggcaactcagataagagctaccccttcagtgttcagataagattgcttctccggcaagatgtagtatctgtcttcttttatttttccctccctccctccctccctccctccctccctccctccctccctccctccctcccttctttccatttcatgatgtttgtgcctcatgaattcaaggcaaacactctaccaaccaatccataatccctagctcagtctttgttctgaaggactcaacttgcttagttagatgagacctgtacacatgacggaaagtaacctttatttaaggtcaaacaattgttgatattattgtatgttaaaaataccttctcaggaaccgttacttcaagtaaagtaaggacttaaaaagaatgagaagctggctcccctagtgtctttaaaatgacatctttactactgtatgtgtgtgtctgagtggatgtctgggcatgggcacatagagttttcaggaagagagaacatgactcctgtctggggcattttagagttaaattggaacaaaccactcacgtgtaagtttactaactgatcttaaatttcagttgctgaaattgctgagaagcaataaataattcttcagtagaaagatgtaagatagaaagatcaagcaagataatcttaaaaatacatcagaaaggattttttaaagatatttggtttgacctattatagacttgcctgaaatttaacccctgggtatatatttgagcctagaaattcatgttgcattcagtcgagatgcaaactgtctctccatccctcatcccattctctagccactaaacagaacaagggatgccacagatctgagactccccatttacaggagctcggaacagagaactaacaccatctaagttggtagctatctagctgtgtggcaaaatgtgtcagatctcccttggaactttacaacacagttgaattggagaaactgagatctcatcacggagctacaggcagtacaagcacagcactcttcctgttggtaattttgagtttctaagtccttcctcctcctccagagttaggaaggaagatggtcacagttagatattgttgaaagattgcgtttgggggagaggttttgtacgaaggatcagggatatgagagattgtgaaagagcagccagaaaacagtggtaagaaagggggcatcagtaccctgggcaacaagtttggcaaaatgggagagaaggcagtgttgaaggttctacatggtacacataagatgaaaagatacaggatggaggtcttggtagctttcaccagaacagtttaaatggaaaagacagaaggtggatatctgtggacaaaggactagcaaagaacttggacaagggatgctatgagagtagaccatgttagccaaatgtttacaaagaatgcttggcttatagactgagtagacagagccaccaaagatggcaagtctgtaaacaaacaaaaataacagagcaaagtccgagatgacaggaggcagaaggctgcatgtagatcgtccttggatgaaagggagaatccttagagatgagagggagaagcctgggagaaatgcaacatcctaagaggacagcagaggaacctagtggaaggcacatgctgccagttggtattgcagggcagctgaggtgggagcccagactcagtccctggcaaggttgacgtgttgtccctgtgtcaaactcacggatataggttcaagagtggaagaggcagatggtttagtaaattcttagtcacggtgtgggcaggcaggtgcagcgatatggtgatttggcaaggcagctagggatgtgggtaggcatcaaagaagaggtggcccctcctaggacagatagttcactactgaggactcagaactttggctgcatggaaaatgaaccactttgtgttgttgtgtttccatttatcatcttactgtatttacacaggttagcgctgctgttggaaaaagctctgtggctagccaagatttccacaccaccctttgtggagaagtgcctgaccaagctatttcgaactgagtataccaagcacaatgagcaaggctctagagcggcagtttcacacaacgaacgtttatgccttgctcgtgtaaggtccaccggggtcaggtccttcacttaggaacagaagttgctcccaacgtgcggctcttgaaagggcagaaaggatggaccaggtgccccgattctcaggacccaaagcagacgtggtgcatgcatgctctcatgagccccgcccgaaccaccctacaactccagtgcaaccacacagaaagtggttggagacaggaggattcctggggccaaggagtggggaaggtaggacagtcatgacgcgcctgctgcccaagactcagggctgctccatctctggaactcacataaaacctgccgagtgagtgcagcaaatgcagtgggcaagacccggactatgagtctaatcccagcactggggaggcagaggcaggggcaggggcaggggagattcttggggttctagcctatcctaactggtgagtttcaggtcccaacaaaagactctgtctcaaaaattaaggtgagctgttcccaaggagtgctatccaaggttgttctctggcctcttcatgcataagaacatgtatgtgcattcatcccccaatatacaccaacacacacatacacacacacacacacacacacacacacacacacacacacacgctcacactcgcacacatgtgcatacacactctcacacatgctcacacactcacacacccatacacacacacacacacacgctcacacgtgcatacacactcacacacactcacacactcacacacactcatgttcacacacgcgctcacacacacacacgcactcacactcacacacacatacacactctctcacacacacatacacgcacacacacccacgctcacacacttacacacatgctcatgctcacatgctcacacacacaaactatgaagaggaagaggaagaagagaggagggaagtgaagatgaggaggcagacaaagaaacatacacagagaagcagccagatgactcagggaagctgaatgagagctccatcatttcccccttggtctggctaagctagggcctgtccacaggaaatggaaacaagcgagctgcaccgccaaatggcctgagtgctcagccctgagaggccacacaagctgcaaacaggaatacatgggaaccaagtgtcccctgggttctggggtcttcccagcttccatcctagcttgcactaacacgctgctcaaggcgctgggtgttcacggtgattatttcaaatgtttctctagaccaagagatgcaaagaggcctctgccacaacagaccccactctttgaggcaacgtgttctttcttcccaatttgctcagtcagtcctgaacaacttttcatggggctgcagacaccacagcctgacagccatgccgaggcgtgtgggacgcgacggaattgctctacaagcaaccttgccaaaggccctttcgatgcacaaagctggctcgagctttgtatattgagggagctaaatcaatgttaaacgcttggctcttttcacaggacaatgaccaggacctaagctgcgtccttcctttttgattgacacttgaaacgcagcgcgggaatcagccagaggcgctgctacaagccgaactctctgctgggagaaccgctggtgacatctgcagaagggccgacaaaaggcagttgaaagctgtgtttgttgcttccctctcagatctgccggctttcatgcagctccttgcctgctttaatattatgattcagcacctggcttttttgaaccttgctttaaacttcaaaaggcgaggtggtattaacaaacatgaaacggaaaagtggcggtagtttgatttactgttgtcgtcttatcaagggttttttttgtcaccagctgccacgttctgtcatctctggaaccattatcatttctctaaaatctaaaagagtccacttaataacggctttgaatacaggcaggatcagtaacatacacagttctggggatgacaggaccatcaaatgaaaagaaagatgttgccaaaaaaaaaaaatcccctcaaaccacacaaataagagccatagtactttctagtgaccttgatttcagaattaaacaaatcaaatccaattctattgttccttttgaattccagtgtagagtttccttgagaagttcctctttgttgttgggagtaacagggtggaaaaacaaaacctgaaatcacaaggctcctctgcatggagaaggaagcgcctgcactcaggggtgagcgctgtaacctctgctcgcttggccaccgggctaattactggctgattttcatcatctttctcctccatggagctcctgccacacttgacactgacagccagaccaacattgcaaaccccgcccccagccaccaaggggcggccggttctgtgttgtctttctcaagcacctaaggaaagctgtggacctcagagaaccttcagactgagtgtgttacagtggagtctagcaaacgaagctcactgatcactctctcgggaacatgaagagaccacagatctctcgggaacatgagcttggtcagagccacgggggatcctagggatcacccaggccagcattgtgactgttccaaggacttttgtaaaaataagggtacctgattcctacccacatctgagtctatcacccagagctcactatgggcacctgcattttaaacagttgctcccggaggtccacacttgcagatgagacaacaagcaggtggcagagctgggtccaagggcaagtgatgagggagggtccagtgccttggttccatggctgactcaggatggaaactggagagtgtttaaatgggtgctgcttttcagtatgggacaggcagagtgctgcttgcctgagacacaagctacaacaacccaaactcacggttttgtctcctctgctcccttgggcaggtctgtgaaacttcgcagtctgacgtcatcggcagggagtttctttccctaattctccctactatggagcgcttccgcttagagcctggcgatgtctgatgtgaaggaagtgacaggtagcaaactttagggaagccagagctataaaacaggcacagctgctggtcactgtcatcaagtgcaaaacctcccatctgcgggttgatctcgtgtccccgcccccagctgtagccggcatttctcttttctgctctagggccagccttgcagccttatggccccatattggcagagttcatagtgaaaacccactgctctctatgccaaggtggcctagtgtttacgtggtcactcccaggcacctcacaagctgtttgggatgggatgggaacgaacacccctggagccatcagtggtcagttctttagatattaggaccgtgacaaaacccccaaataagaaaatcaaccccaagcaaaatcatgatctcactagtactgtgaatcagatccatgcagatggcatctacaacaatgtcatccaacaatggcacctgctttgatctccatactagccctaaccagagcaagcagcagcctgacatgcagggccaaacagagtcagtggcagagatcctgtgagggtcagcagtgcctcccatgggcaaggggctgtgttggtttgttaatcgtaagaccggatggaattggtcaaattgctcagctttctcactgaaaaatagccacgaggcctcgcagtgttttgagacttgatgaggtggtcaacagaaactcacaatcacactatcatgaagcaattgtgattgctcgctaggggacaggactcaagaattttgagacaagaagctatgtctatttttcactcttcagcctggcaaccggctctgcaagatggatccaccttcccaatgtggtccaaggaagggatatgcatcccctcagggagaaaggggaggaggaggggacaccgggaaagcagaagtggaagggaagcctggtggggaaaccagaggcaaagtatcccaaatctcagattatcttttcaaagttttctcttttctttccttccccattctctcttccttcacctgctgtgcccccatctccgactctctcccttccataccactagcattgtgacctactgtaaaactgtctcattttgatcacaaaggtgtttatccccccctctactagactttatagttgttcctcttggtagagatctatttccctgtttctgtacttcctactgtcaaaggctcagcatgccaatggggttctgtggtagtttggtggtgagagatgccagactagggttcggaagccacgggccagccgcatctttgccgagtatatgccaggcacctcggacaacattgtgtagccattctgaaactctgcgtttttcttttgtaaactatgactagaaaacatccttgcctgctaatcttcttggcagtcttcaaggagggaatgtgtgtgcaacagctctgtgggctgctcgtccagtacacctgtgaatggaggctagcccagctctgcaaagtggctctacctcgccactgtgctctgaggaaaggacatgcatcgtctcaggggcctgccccactgtcctctgacctagctccccaattcttcctcctgagtcattatatttctcattaaaatttgagagtcatcatttggggtgaccaagtgaccaccttcagccatccttataaagaagcctgtggtcctacaagagtttactaaaaacagcttggctagtgtttgtatttcagaagaacacagggcagagagctgatagagaggaaaaggaacgaaattcatttcagtggcggtttggagtcacaccaagggcctgagcctggctctgccctttgcagactaccttgggcagacaatcctcttatgctgcccatgtccatcttatctactcacgactcctccgcaagtgttagtctgtaggtcacacatgtgaggttctgttctagttagtaaagcacttacacccctgcctgtagcgagcctgcactctaaggaactctaactggggagacagattagaacaagaaaatgcagtaaggggccagcaagagggctcagtggataaaggtgttttctaccaagcctaaggacccatgtttgattcccaggacctacacggtggaaagagaaaggagataactgactctcatgagttgtcatctcacctccacatacacacacgcacacatacacacatgcacacacacacacacacacacacacacacacacacacacacacacaaataaatacatgccaaggagtagggatatggagttttctttgcatttggggtgtcatagctcatatgacttggttattcataggttagattttcccgagtagggttgagcatcttagccttggatcgggtgtggggataaggaaggagttgaagatcctggaagggctagctgagggtggggtagacgaaggaagaattccttactggtggggcagggttctgctttagacacaatatacttctaaaaatgttatgacagaaaatccaacaagagatgagcggggcatctgcctgctggcggatgggatgacgcacggaaactgtctctgtgtgatctaacactgagctcagtaagttgtacctgtgtggagaccagacagacctatgaacccaagctttgagctgggatgattcttgtacagttgagaggtaggcaatcaccgggaggaagaggacgggaccccagcgtgggtaaagcacaaataaagaaagagaggcaagcaagcggggaccgaaggtgttcctgggatgtctcagggctcagccgtccttctcaaggtgtcacagtaaagccagagactatttaccaagggctgcaaggtccaacagtttctcctgtaaaagagattgcttttattttcaatttcatttgaccaacttaacaacccagtaatggtcacgatgtagaagctatataggaatgactgctttggtccagggtgcccaaatgatcagcagtggcccccgttctctctctctctctctctctctctctctctctctctctctctctgtgaagatgtagtcttaagagtgtgaaggttctgagccacggcggcattcgtgttaccaaaattcaaatggttctgttctgtgtccagtgttttatttgtaaactagacatgcacacaagcagtgttggagccatcgcttctcgctggtttagatgagtgcagaggccactgctgtcaaggaaaacttgacttgattcctactatggggaaggcataatacgtgtgagaacagcaaagccagccatgccccaccccatagcccatgcactttcaccaacatcccatccctgccccgcccctctcccatagcctgatcagcttcatgagcagctgggatggaaatgaggcctctaggaaacttcagagttaatcacgcctaatggtgacagggattcaggagagggagccactggtcacttatctgacatcacacagatggctcacaccagaaactcccttgcaacattccaaggtgtgtcccccaaaatcaatctgccaaggagcccttggaaactgagggctctgagggggagttcaggtgtgtgaactcaggatgtagggagaggggatcctctctgagctttctgcttttcatgtaagatgtgaaaaccaattcctcaaccacagcacgggcacgtcacacacacacacacacacacacacacacacacacacacacgtgtgtgcacaggcatgtcacacacacacacacacacacacacacacacgtgtgtgtgtgcacaggcatgtcacacacacacacacacacacacgtgtgtgcacaggcacgtcacacacacacacacacacacacacacacacacacacacacgtgtgtgtgtgcacaggcatgtcacacacacaatgcccactagtgcacttgtgcacacaggcatacaaagctctcggggttgacgttcatacatcctcctgtttctccggtattgtttaacaggtgtgtagagaaacagaggccaccaaaacccttacaattcagtctcttaggacagtcacttggccctcattagagactcaataagaagtaatcaccagaagtggtataaaaaatgtccaacagttgaatttggagtaattaatctatttgagaaaaagaaaagcttacatttggctattggttcttatacattttcccttcagctgcgggccagttattaattattcctttcttcccttgtagatgactagagcccagaaagaccacagatctctgttatctgcccatcctatttccagaatccaggacaaggcctggtgtcttctggtttgctatgaagtatttgttgatttgatgactttgtatattcaggtccaggttttgaggaagttagactctctagaaagagcctgagctatcccatgagcagtcaagttactacagatggaacccaaggccacacatgttggtttagcagttgttatcctgtggtctgtcctggcaaatgctgggtcaccatatgaaccttcagtccttcctaatcctagtcagacatgtttgcaaagtcacagaagttttagacaaatgctttcacccaggaaaaacatgtatcgggataaaaacatgtcctttaagatgataaggtattctctgaagtcgagttgatagtgcagtgtggttgactgcgtgttaaatctgatccaccagaacagtgacaagaaaaatgagaaaaggtttcttgataaagctgttagcccatgcatacatcatcccagcctcttgctgctgtcctggaacaaatcagactcccaaaggcttttgctgactacgactgttaaaagaaagggttatatcccaggctagaaaacaattcctttggatgtgtggcttccagttctctgtagagaaagagaaacttactacttcagagaatccaaaccacagtcacctaagagctctgagatgggtgggtgtttgcttcagaaaccaccctgaccacttttccttgggatgcaaagtgagttagaggagggggtctctggggagggggcatcttactcagaatgctgctgtcaccacagacagtttgtagaaggagccctggcggtggctgatctgggtttggagggcagattgctcatccctagttctagattggttgaaacgctggacatagatattaactttctttttcaatccatcatgtcatattttaattatgggcaactctggctttggaaaagtctgtactctttctctttatcattctcggtgagcaggatgggggaagactgccttccaagggaaagctctaatggaaaccatgtggccttgagccatgatgctgtgtccagtgggaaacatggagtctgaagggccaccctaggggaaggacaaaggaagctttccctaaccatagcaagagggagcaggagaatcacagatacatttgctacaaggtccactactcagggttcatccatgaagcagaaactcccagccacgaggagaacagagcagctgttctgagtcattgtcactgaagtggagagatgggaaccaaaggtcccaaagacgttggcaatcatctgccctagtggctgtcaccatcactataaactggtcaatacagaggagattgcctgtatcagggagggaagtggctgcagtctttcttttaaacaatgtcttcacacagcagtgactctggcccacagtccatgatggtacatcatggatgtgtctaatttagcaatttgcagccccgagacagactgtgatcatttaaagaggatgacacttcatttaaaactgtcagtcagctatcgatgaggtcagacagaaaacaggtgaaaagaaccgaggcccttccggtgggagcggcaaggactccaagaaccatgcaaagaaatctatacaacttgggcttggatatgagtgcacctctccaccaatcactcttccttggaggctgctcaggtatgagcaaggaggaagacttaacttggcattctaagaggtggtgcaggctggaaacagtgtttggaagactcttcagggatcttttaaaaaggaaagttagagttgacgtcaaggtacttgttgatgcctagagtggccagcctgggccataacaaattcacactctaggcatcaacacatcatataaggctttcatgaagcctagcaataggtgcatgtgggccatagggctggatgctctttctaaactcccgggagtgtgtcccggtgagaaaacgccttctatctttacataaatttcagtgtggctgactccctcactcagcaatggaaaaataagagtccagtgagacacctggcgaaaggcagcactgtgaactcccgctgtcctcaattatctggtaaagacaccatcaccataagtccacggagtattttgtgtgtacagattgattggagtcttaaccttgggcttgcttctcagcgcccccaggaggtttgaagcagacaaccaaccgtaccatccaggcggagaagcagacccgctcaaggccatggaatgaatggagcttcaaagcaagccctctctacttcattgctgctattacttccaggactctgttggccaccaccggccttcagacctccctgtgcacaggagcaagatggttctgggctttaatggctctgcacttagcatggcgtgttctagtacagctcactgtcgtttggctgaacctaggagatgtattgaagctgttaggaacagttgaaagatcacagacaagatagcctgttttggccactaactcttcaattccccaacactgtgcccctggccctcccaccctttcctcctgctctgcggcccatggtgcatctcaaagaacatttacacctacaaaagagaatcacagagcctatgaagaagactcaggcaagtccagagctccgggatattcaaccgttttgaacacgcgcctttgataccctctccagtttaattggaagactgagatttagaggcaagcaaagtcaggtgaacatagcactgggactcaaaacgagtgtggaccttccctctgtctcttctcttcccgtcggccactgtcacctggtctacaggcaggccagctctcatctcagctggtcagctgtacccagagtctaagtaagtctaacaaaaaccccagttaatgcttcaaatgccagattgccttccccaaactcccctcctgctttcattggagacctatgtcaaaatccagtccttcctttagctgggtaggacactgggctcttctcttttgtaatgtatttatttttattttatgtgcattggtgttttgcctgcatgtgacagtgtgagggtgtcagattttggagtcacagacaattgttagctgccatgtgggtgctgggaattcaaccaggtcctctggaagagcagtcagtgctcttaactgtggagccatctctccagccctgacactgggctcttctatgggtcgatattttgtggaatggaatttctctctcacacaattacatggtgtcataacaaatagacaaaaatgaacatgaatgtgttgatacagtacaatccagatccagaacagtacagaagtactcccaacttgtcaagaatttaaaagccaaaattttccatggtgtttccaagacttaaggaaactttcaggtagcaactctttacctcaaagccgtcatctaccttcaggcatctcaggtcttcctggcatttgtggctcctggacagtcatggtttgaatctgagcaggcagcagggtttcaccctactctgggtggcctcagttgtcacactgtaggtgaaaaagaaaacagaaaaaccaggagtgtaaggagaaagtgactttcccccttttccttggtgagcaggggaggcactcagttccctgttccctgtatgatctctctccctgcctaaagaaaccaattcccctttctccctgtgtggaattataggttcactcaaaggatgggtgagccttggtgagctgttggtgcagggtggtaattttgcaatccaccctagctgaagtaagtatagccctacacctgccctagcccctcagcccccacttaggtgaaaacactttgcatataaacaaactcctctcaaagacacctcaaccttgacatttctttctcctttctccaacttgcttccttttcaaacacctcttgcccgcctgccatgctcccacctgaggcccaattatcagaataataattaacaggctctcattatttaggatcaaacaatgcccccctaatgaagccaggaatagccaatgtgatccctgaaaaccgggcatgagcttttcttacaccttggggcatctaatccactgaaaccctgcaaaggcctggataacattgagtcaagggcagttaatggatacccgagcacagactaaagtgctccaagcatgtcagtcaagactaaccggaggcaaaaacatcaaaatgcaggttggagttttgacattcctgcaggctctgaacgcctcgccagtaaatttttaaagtcaatatccccttatgttcccgaccactcttctgtctgatgagtcggcccaatgcgggtgtgattgaactagggagaaagcacgactttaaaggcagctttgaatgtgtggggggcagaaggaggttcagggtatgtgttttgtgtgtgtgttttcttttcctttttttccagaattgtctgtgatagtaatgaaggcagtgtacacagattatcacaggctgcgtctttcgacttcaaggttatgtgattagaaaaggagaaaagcgacgagattagaaaaaccgcagaacattttgaaggaaagcttttttacaaattatccatgtgccgaattgacacagaatctgatagatggatcttctaatgtttggaaatggataaatgcaacaatgcaaacagaagcaactggcagaagttcaaaacccatattaactattctaattcacttcaagccgttacatgtacacacgcacaaacacacacacacacacacacacacacacacacacacttaatcatcacacacatacacaaaacaaaacatggccactctatctataactgtacggacagcatgaggcttgttgtttatttctggagtggtggcaaacctttgcctcaatagccttctcttctcaggtgcggaggtctgtgatgggaacaagccttagacatctaagtggagaggctaagggtcaaagagccgactggaaactcaagtcacagcttagttcttctttaacaaagaaacaaaattaaattctcctgtatccaaacgtagtctggtttaaattaaaattccagtaaaaaccactgcatttgcatatctgaggagcagacagcctggggaagagagggctcctgtcccaccacactggaaagtgtgccctgcctgtacctgcagggaagaatgggaccacctagcctgaggagatgctgctgctctctgaaagtgtccttgctcctttgcaaaggcaaaagcgatgctgaggccaggacgaactttaccctatgtaactggaagcgttgagtgggtagcgtctagacatatttagatcaactggatgccacctgactcaggtcttccagatattaaaaatataaatagaccataattgtgctctgggtcagactcagcccttgtggacctcaagtggtgacttcagttatgtttgagtgaaggacatcgtgtttaaagtgtagcgatgtctccaaaacgtaagatgtccttagtaaggtatcagatgttaaaaaaaacccattacttgtgacattatctacattttaaggtgattttgggattcagtttatattaaatgagactctgatcatgaatgccagaaggtttcttcccacgcggatcttggtaaacctcctgcatgaagacaggaaccccatgcttcatctcttcatcccaccactgttcactcgtctcacgctgtgtgaatgcatggacacaatgtagccagctgcctcatactcctctgtcacaaactaaaccaaaacaagctcttacacccccccccccagtggcttttgtcaggcatttgccacaaaagtaactaatacaagataaatccgtaactaaaacagactaacacagtaaacttaatcgcactgtgtgttaggtgatgtgttataaggaggggaaaatgctattaaagaggacaataggggtcagagatgtgcagggaagatgggtgactcctctgacgctcggctcatggctaggaggaaggagcctgtggggaaacagcgcggccctgcaggacctgagaggactgtggggcctggggacagaaaggagcagctagtgggagagatgatagcaaggcggggaggcagagggatgccctggccagagtggggaggagagatgaagtcagacctcgtttgtcttcgcttctttggtgtcttgcgtggtttggtacctggaacatcctcagaggttcttagtgaatgagtgagggaagggcgtgtttaggaaggtcttctgacccaagcctcccactgtgtgttgacatactccacaaccagccctccccggtcattctttggcagcttggtccctgtggagactccaggaagaagaggttccagggttcagtaagttctgcacttggtgcatgcacagctcaggaagtcctgcagggaagctggctgaatggtggctcatgtagccggaaggtacgcaactgcagcgcccactccaccacctcagtcacactctccctgtccttctgtgactcggggtcttctgtgggaggtgatgacctatgtggagctgacactcagtcactcccagaggcgtgaactctgtctccagtccctcaaagccaaaccacccttctctggacatttctcttgaaattctcctgctatattgagaggaataagatctgccacgttgtaatatctgtctattgaccggggggggggggaggtcttattaaaataatctggggttatagtagggctttaagatgcttgtttgttttagggttaagtcccttgccactttccacttgacgcacagtgtctgagtcttccattcttgtttctgaatctaaatgacctgcctctcaaggctctcttgaggaagagatgaaattagggcagagacaatgcctaggcgtgtgcctgtgaggttgcggtcactcagtttgtcagcgagtgttaattggtagctaacacactctgggcttatctgggaaatggcctctggcatgcctgtggagagtcatcctgataaacatcttgttaactgggagatcctgggcatcactgttccccagctgggaagtgaggcaagtggagaaaggcagcccaggagctgcatgcagccctcactctctgcagctcctggatgtgggagtgtgtgtccagctgcctcaggcccctgctgccttcactgccccttcatgattaaccgtaggcttgtacctggtgccagaaaatgcagaactcgcctttcttccttaaagtcactttagtgagagtgttttatcatagcaataggaaaaggaactaaaacaaccagtaagaattacctcccttgtatgccctctttcgcaattcctttcacaagtgtggagagaataaccgagtttctccagagccttctctccaccaggctaagttcctctgagcactgatatggactgtgacctgcagatgacactgtacagtggccacaggtggggactcctgagcaccagactagaaagctcacattgctcataaactgagaattccataataacttgaagtcttttcaagttctatggaaagcattgcactttacaaatacattgtaaatttataaatgcctttttttccaggtcactgttttaaagagggtgtgtgtgtgtgtgtgtgtgtgtgtgtgtgtgtgtgtgtgtgtgtgtggtgtgataaataaataaacccagagactgaagctaaagatcagaaaagtaaagcagccagccactagctcttacctctacctcagactaaaaggcgatcctctgtcccgcgcgctctgtatttctcgccagcaagaaatacacgcaggacactcggatccttctgcagacaagctttaatgcatcttgagagtaaaagagcataagcttcccagagcggagactgagcggagaccccgagccaagaatcccgtcccctaataaaggctggcaaccgccgcctcggacgtgtcaccccatgattggctgcagctcatccggccatatgacgccacggaataggcagagatcaaggaatggaaaattacccagcgcctgcgcaataatcttgtttacattcggtgcctgtcggatgcaggcgccatcttgtaatggagaatgcagggacggctccctacagatcccccttttttattaattaatgataaggctttatatttttacaagcaaataggtcacccaaatgttgagggatagaggcagaggttgaaccttcccaaaatcaaacattaagactgtgtacgggagtcgcgactaggctgttagcttgacccgaagcactctcgacctgtcctctgccgtttttctgggaaagggagtctcagggcaggtaacccttatgcaggtcaacgtgcctcccagagaagcctgcatattgggcaactctctgtgcgatgccttgctcgacatccctcatgggctgctcaagccaggcactctaccctgtgcaatgagcctaggctccgggtgtgcaagagctgtctggccagcggcctattgcttaagcatagttagccaaatatcagtggaagccccttgttccaaagctacaagcgcttgggcgataaccaccttgtctctcttagtttgagccctgagcctacagaccagccagagaagcaacatcaatccgcagcaaacggctgcaccaaacaatcccacctccacccattccttaaaataggagacagctgaagcaatccatgatgacagtccctccgtcaaggacaggagttaatctggataattcccggggggagggtggagttccgacttttgaaggtccgaagaggctcttcaggttgagtctttctgggatccacaggggattctctttatcctgtggaaaaacacatatcgctcccctggatcttatgagaataggatccgggcctctccaaagaccagttaagacatcttttcattttaccatctccttagaccttttaggttctgaggtatgacgcttggccactgtatggccctgagcgtcggtgtttagaaaattaagggtaaagagtgccatggatattgcaactcttggcaccgagggtaaggatgctcccattccctccttttgtttgattaaataagacttaagtgtgcgatgggcacgttccacaatgccttgtccttgagggttataaggtaggccagttagatgggtaatttccatctgtctgtagaagtgctggaacttttgagaggtataagccggcccattatctgtttttaagaagcacacaggtggctaggtaaagtcttatttctgtaatacagctgaacttccttaaacagtagcttaacttctttctgaggcagggtttttctgtgactttggagcctgtcctggaatttgatctgccggaccaggatcttataaagatccatctgcctcttactcccgagtattaggattaaaggcgtatgccgccaacgccctcaacttaaaggcgtgtgtcaccaacataatagattagcatcttttacaaagcaagaactttacattgtcaggctttgcttaaaaataattctaaattgaagctctttaagtacaaacattaataaaatcaaacatttgaaaactggttttaaaaagaaatttaaatttccttaaggtctttctttaatatatagaagctttaacattttaaatcttaactgaaaaacttgtttctaagatggtacctctaatttccatgcggtaacctttagtcaagatggcggtttaagtatccttttcttaactttagcaaaatggctaccgtcagtcatgtgaccagctacaaaatggccataccaggaaatggaacattttaaaacaagcatacataaattacttgagcatctttaggatatgaggcttttcccaggcaccccaggcctctaagaagttttgaataacatgtgcggccttttcccctatcaaagactgggaaagccatctgtaactttctccgctcctctgatggtaaaaaggagtcggtaccaaatagtgggggtgctgatggaagcacacccgctggcatttttggcagccgatatctatcggggtggtatcgtgctgcttctttctctagctctgcttccttgctagagtctaaaatctcagagtctgagctgctcagctccaaggcttccagtttcgttgcagggcagaggctaggtttcgagtcctcatctctcctaaatttaccggggtgtgaccggttatctcctattttctctccctccatttttgtttctttttcacctagctgagctgtttcctctaaaactttatctcttgagcttttagagtcatcagagctatcaagatttaaagctttgccctttcccctggctggcagcgcggaggccgcacgatgcctggagtcactgtaaaagacgttaaccagcaggagttcgtcagagccctggcagccttcctcaaaaagtccgggaagctgaaagtccccgaatgggtggacacagtcaagctggccaaacataaagagcttgccccctatgatgagaactggttctacacacgagctgcttccacagcacggcacctgtacctccgcggtggtgctggggtcggctccatgaccaagatctacggaggacggcagagaaacggtgtcagacccagccacttcagcagaggctccaagagtgtggcccgccgcgtcctccaagccctggaggggctgaagatggtggaaaaggaccaagatgggggccgcaagctaacacctcagggacagagagatctggacagaattgccggacaggtggcagctgccaacaagaagcattagaacaaaggatgctgggttaataaattgcctcattcataaaaaaaaaaaaaaagatttaaagctttaaacttatttacagaatcatctaacaaattattcactcccttgtcagtagacatcccaggaggtccttttttcttattcactcccttgtcagtagacatcccgggaggtccttttttcttatatgttgttgttcttaaaaaattattcactcccttgtcactagacatcccgggaggtccttttttcttatattttattgttaggcgcgccccatctctcaccacattcggtttctgatatataattttggacttctttaagattgctacaacagtgagaaaagtcaaaatagctcctagtaaaagcatagaagcctctatattaacctcccacaatagcaacattcccaagccaaagtccagaaaaatcatacctctccgaatttaccaccctgcagttctgaatccgccttgtagccaaggggtctccgcggtgctggagatgttcatatgttcccgggtttcggcaccatatgtcccgcgcgctctgtatttctcgccagcaagaaatacacgcaggacactcggatccttctgcagacaagctttaatgcatcttgagagtgaaagagcataagcttcccagagcggagactgagcggagaccccgagccaagaatcccgtcccctaataaaggctggcaaccgccgcctcggacgtgtcaccccatgattggctgcagctcatccggccatatgacgccacggaataggcagagatcaaggaatggaaaattacccagcacctgcgcaataatcttgtttacattcggtgcctgtcagatgcaggcgccatcttgtaatggagaatgcagggatggctccctacaatcctcagattgctcccgccttcactgctcctcagatttactcagactgctatgctctcctcagcgtggctggagaatatatgccttcctctcctcaatgtgattggagagtgaaagccagccccgagactctgatcctgtcttaaatacctttcatgagtcccgggattaaacttgtgtgatcccaagtgctgagatcatctttgtgtgaactgtctctctttaggactggatatatttcatgtagctcagtatggccttaaaccaacagagacctgtctacctctacctcccaagtggtgggattaaaggtgtgtgccaccaccgcctggcttctatagcttgtggccgactttgcttcctgaatccttaggcaagctttaataaatcgatcataaataatatatcaccacgagtgtgtgtacatattcatgcgtgtgagtacaatgcaggctcctgtatatcctggaaggaatacagaagtcagagggcagcctgagggtgttagtcctcagtttctaccctgcttgagatgatctcttgtgtgtctgtgtgtgcgtgtgtgtgagctagatgtcccacaagcttctgaggattttcccatctccagttcccacctcttagtaggagtgccggcctcacagatatgtgctgccacaccctgcattctgggaactctggtttcacccttaagcagcaagcactttacccactgagtcctatacattgaacttttcagtgtttatcacacatgttttctctattaggaagtgattcaaaaatatgcaaatcctgttggccatgaagttaaattcgtatagtgttgtcttggtacttggctgacatgctctaccccacaagggccacaccccacatacctgccagaaggaagatgcctcacttctttgcttttttcctgtttcgtagaaatgctgaacggggcttggtagctcttgtacagcttacacaccttcatgtagagactggacctttgccctctctgcattcaaattcccactttacagcagggaactgacacatggagggtacccaaaccacaaaaagcattggggtcagtggggggcatgggaggatgttagggtgagggaatggagggattgatatgtaaaataagattgtttctaaaagaaaaaaataacacacacacgcacacaaagcactgagcctatgtattgtctctatttgtgccatgatcctcggccttctttggaaagtgaacctgggataagaaacttaagaggctttctgtttggtaaccttgtaccatagtcatttgacctttaactggccacctcttcttatccaaattgctttcttctcttcccagaggcctgcctcagaggaaaatacaccctacaatgatacacttcaagatctccagtgctcaacattaatacatgtcctccccttttccagcaatttctctgtgacttcatctgcagagttacagttacatctcagagatgagataaggagaagacaaaatacacattttaaacttgctctgtgtgtgtgtgtgtgtgtgtgtgtgtgtgtgtgtgtgtgtgtgtgcctctgtgtgtgtatctgcatgtgcaatagtgtatgcatgcatgcatgcgtgtctgtgtgtgtttgtatgtatttgtctgtgtgtgtctgcatgtgtatgtatgtgtctatatgtgtgtatgtgtgcatgtgtgtgtatttgtctgtgtctgtgtgcatgtgtgtgtcactttaagagggttctttctccttgcatattgttgcatctcttagaaaagcatcttaagcatgtcactgtcatcagttcactcagaaggggctgcatttagttgccactaaggtgacaaagtaacagttccaacagagaagaggtgagaaagagagggctcactcatcagaagtcactgtacttctcaataattggtcaggacaagggagggatggaggtgaaggatgctgggctggagaagatggaagagtgccctaggaacagggttgagattcctttcctccgccaggaacgcttccgaggtgcagctcctgatcccactcccgccccaactgaggctcactaatgctgaagaagtcacttgatcctgacctcaacaatatactaaattagagttgaaatctctttccaccataggctctgggtttggggagcaattttgatgttcccccatgcaactgcccaatgtctgctagaaagaaagaccagtggtgtttgtgacaaggttgtcttttccaggctggttgctctccagttcttcctgcacctgtccattaacaccataaccctcggctcaaaggtcaccaaatgatccacatgcagaactgcacagtctggttgtgacttagaaatgtgaggttaagctcctgtcttcatgggtgactccatagacttgtccaacttgaccatggacatcatctcatggtggcaatccttcagtgaacacttcaaccctaatccttggctcctgtgtttcttgttttccccgctggcccacagagaggaacagaaagcaaaccacccaccgcctcattccatggtgatcccttctgctagagccaccaggggcttgcctgtctctccttgagagcctggatcatgtgatttctcacagttgcattctgcctccctggaagatccacatggagaagccccaactcccaacacaagagttaggagtgtggcccttgggagatcatttagttcagaataggtcagggagaagagcccttgtgatagaattagcacccttataggggttagaagagaacttctgccgtgtaagggcatggtggcaactgcctgcaagagaggacaagaatccctatgaggcccaccaagatggtacctcacatccagaactgtgacaagaagggtggtctaagccactgtctgcagtaactttttagagcaagccacaggatggggacagggacattctggaaatagcttcattaagctgtgtcaaccatgccttaccctgggtcttattctcaagaaccacacaaggtaatctagcatatcaaacattctctctgtgtgcattcatagcacgcaaggctgcttttgcacaaggaaaccctagcactgatcacattcactttccatccccatcattccacggccactctcacgtcacatgtacacacacagttttatctgtcccgtaaactctagtaaccacaaatgagacagaacacgatatttgccagaaacgaacttaattcacttaatacgatggtctctagtggcaccgttttcctgcatatgacataatttcattcttctttatggatgaaaaaaatcccattgtgtgtgcaccacgttccccttatgcccaggtgggcgccataactcagctcttgtgaacagtgttgccctaagtgccaacacacgtgtgcctctgtgacatgtctgtaggcaaaccattttcatcctgttcttctagcctgaagtcccacgccaccatacgaaggcactctctgtgggtgtgagcttccggaagtttcctctttttctggcttgtgcagcacaccataaacttccctaacttttcccttttaaatgaaagttttcaattatcgtcacatctgtcaaatgcaagtctggcggtaagacctgacagagtgggcctgctcattaccggcttgctaatgggaacagagcgagggtggtcttctggcccaacagctcaagtccgcattagctgctgcttagaaaaaggttgcaaaacaccatccctaatgatttaacagcttgtctccgaaaacacattaaccaagggagcttttaaatattaagaaataattacaccagctcagtgttgtccttactcaaattacatcacatcagggctctgctagataaataagtttagtgaaagaacatggtcttgtaaaaatgaaaaacttacccggcgaaacgttatttccagttgatggcaggaaggtggacagaggggaggtagaattagtggaaatatccaggcaactttcccaaatggatacttggagtcagcctcaccctgggcaaattaattctccattatcggtacttccaactcgtattttcccactatctccaaccatttggggttggattctatttgaaaggagctagagaataccagaggcttagtgtgctctagtgaagccatgagagccatttgaagtctagaaattagatactagaactgtcttggagctgcggatctggcttacattagaaagttctagccctgcctcaataggaaacttaattttgggaaaagggaaaagtctcctaagaatacgatgcattgtccccacaaaagggccaccaaacccagaaccccacttttgaacatcaaccccacccctcacccccgtctgtagaatttaacctggatagcacatcagggtgacttaggtatgagtgtgaatgagtttcgtagattaccttacaccctacccaaacaagacaaggtcactttgaagtcactgagaatggctgggaaggacccaaggaaggaaatagactcattgtctagtttttctccagttaaggaaactctgggtcctctgggcctacaggcttccaggggagtgtcttgctcctgttcaggctgtgggagagttctgtggcacagcaggtgttggagacaggtagcctctctttgggtgacttctagaaagacagttcaagcagacctgggagctactgaagaccgtgggctgcagtggagttgggtagcatggtctctcacaccccagcagcccttggtgtgactaacacagctccacttttaccatttttctctctattgctgtggagaacctctacctcttggtcaaattaacagaagggcggggcagagctacatgtctgtactttcataggcttcctaataacctgcttgattgtttactttctttggagctgagtttgcctgtgatagacctaggagtctgggcagtgattgatgaagcctggtctccctgtgggtccagtgtggagctcaagcatcatgatactggattatgagtgactgagtctcttggtacacaggctagggcatgaagcttgtttatatttcctgtattcctcaggttggtgttctgctttttgtcaacttggcacaggccagcatcatctgggaagaggaaatcctttttaaaaatatttatttattatgtatacactgttctgtctgcacgtttgcctgcttgccagaagagggcatcaggtttcatttcaggtggctgtgagccaccatgtggttactgggaattgaactaaggacctctggaagaacagctaatgctcttaacctctgagccacctcatctctccagcccaaagaggaaatctaaactgaggaattgtcttcataacattgacctgtgggcaagcttttggtgcattttcttgactggtgattggtgtgggaggcccagcccactgttggtggtaccctgcctgacctggtggtcttgagtgtataagaaagcaagctgagcgagccagtaagcagcactccttcatggactttgcttcagttcctgccctacttgagtgatggacttccctcagtcatggactgtgagctacaggataaagcaaactcttttcttcccaggttgcttttgagaaaccaagctcggtgcctggaaggaaatggctgttcaggtttcccaacaaaaccaactgctttgtaagtatctgtatttctcctgtgttctgaaattaaacatgcccagacaccaagaagtctttagcctaagctcagatggaaaatgccaagcagctcagccaccatggttctattccatgctggcagaagtcactttttaatgccaagattgttcttcttccttctgaacatagggatggtttcagtaaacctcttaacatggcaatcctcctaacatgggcaaccctcccaacatgggcaaccctcccaacatgggcaaccctcctaacatgagaaccctcccaacatgggtgaccctcctaacatgagaaccctcccaacatgggtgaccctcctaacatgggcaacatcctaatatgggtaaccctcctaacatgggcaaccctcctaacatgagaaccctcccaacatgggcaaccctcccaacatgggaaccctcccaacatgggcaacctcctaacatgggtaaccctcccaacatgggaaccctcccaacatgggcaacctcctaacatgggtaaccctcctaccacgggcctataggacactctgaaatgaagtgctctttgctgggcaccaattaaatgcttctcatttctataaccataggcaagctgccatccacccttctgtaaaaacctgtctagttgagcataaacttggccagaaactacattggacagccatgaactagacagtaatggtgttgatataatacactaactacagtgaatacattttttggacttcttgtaaaccatcccatgtttgtttgttcaatgcccagggaaattcctaagacgggaagaaaaaagtatgtatattccacttttacctggtatgaattatctgggatgagcactctctctctctctctctctctctctctctctctctctctctcacacacacacacacacacacacacacacacacacacacacacacatatgccagggcgtggatgtcagaggacaacctgaaagacctggttctcaccttccacagggtatgtccaaggatcaaactcaggtcatcaggctttgaggcaagcacacttggccactaagtcatctcagcagcacccttcactatttgtacagtctgtgtacattcttatgatggaaatagatgcttctgtccaaggaagtccagattcacataaaagaagaaaaaaattctctccgctgataagagaatagtttgttgtaaaccttggaactctgaatatttaatcctaatttcttcaaggactctgaggaagtaaatcttattgaaagtgatgcttaagggctagagtataatgaataatatttacctatcatgcccaaggtcctgggtttggtcgtcatcaaacaaattctggggataatgtaggggaaagggtatttcaactacagaatccacagtgaggcttttcaaagcaccagagatgacccatctccagcactcctggctgtgtgctaacatcatagggatccctgacatggcactacacatattttccaaggtatgaaatctgcccggattatatgtacgatggaacactgcatcacaagaatgaaatgacatcattttcagggagctggatagatcaggatagccatgtgttaaacaaaataagtcagtcaggaagacaaatgtctgctcccatgagcaaaatctggattttgaactaaaacctaaaaagagaaaggagactatttagtgagaatacttgtgcatttattttgagacaggggcttactatgtagaccttgaactcacagagatcagcctgagtgctgggattaaaggtatgcgccaccaccacccagcccagactggggactgtttgggaaggtaaaggagaaagtggttttggaaaaggaacaagagagtcatgggtaaaatgatcaaagtatataataagcatgtatgaaaactgcataatggaaaccattcttttgtgtatgtctgcatgcatggcgtctgcatgtgttcctgtgggcgtgtgcacacacgtgaaagggtgcatgcctgtgtttacatgtgtagaggtgagaggtagatgtcaggctcttcctcttggcctccctttccactcatcctttgaactagtgtctcactgaacttggagcctaccactttggctacctgggctggccagtgagcgctggggtcccccagtctctaattgtgcatcacaggcctaacttccaggtgagtatggggatcacttggatcctcatgcctccacagcatgaactgcaccgagttgtgtcctcagcccccccaaaaaacaaaacaaaaagcaaccaattattttgcacaatgggcatattctaacaagaacttttaagtaatgttctatgttttccttccggttctcttttccctcttcatcttgcctacaatatctgtcaattgctttctggttagactagacacctaatagttaccaacggacgacctcaaattaacagccattacatcctcctgttgctttctgtttggacacaagtttatcgatctgctaagattttgtttctcggcaacacaaatagcacggcatttaatttggcatgtgcagtgtctgagcagcacatgagggacagttaaagaggcagagtgtgcggatgtggacagctattacggctttcgaagaagtagggggataaacaaggtttctttgatcactgccatctcacttttggactttcatcccagatgtttgacaccactggttggcagatggagtaggaagataaatgtgcctgtgtgaataagtttaatatcagaacacacattagttcacccaggcgacagccatgtttgcaagctttggcagctaccactggggatcccttcaggctcatggggccaaaaaggtgaacacgattgaggcacccttgactgaatatttcacagcccaggcattcccttttcactcgggctgcgtgttgactgaggcttctcccgagttgagtcctcagttgactgatgaatacaaaactcctctctgaacaaaaggcattcaaggttccccgaagacaagacagcctactttggtttctgtgtctggtactgcggtatcaacggagataaaacactgaatgacaggaggtgcaatactgaataacacaagtcattgtcctcccattgactgtcgggataatgggagttagcgagtcaccgtaatgtcacggaccactgtgaacttgggaggactcaaggatcagaaagtaacatgaaacaaggagagaaatggagataatatcgggttactgaacattctcaaattgtcctgaaacgcatcccgtccctttggagggggcatgtttttgacaaggggcacaatgggaagaaaccggcggcggtaacaatatcagtgttttctttcactccgggctgtaatgtgaactccttagaagactccttctttcaccatgcctttgttgtccgggctattgaggaacccggagaccaaagttgctgccctgttccggggctgtctgaaagcaaggagcctgattctccaggccaaggacagctgccctgttgtgaatgacagcaccggtttgcagccaagggcagaggaagggaactgggagggaacgtgagacagccagagagggaatcagcagggcgaagaatttggggcacacaagtgaaagagtaggaggtgagaggtgtgggtggctgcggcgcaaccagggaaaggatttgtggcgatggacgcacggcgggttgcatatgaacactccgtcgttccagaacccaaacgtgtttctcctccaacatcatttgcatctcggcagtgtgagagccgactcccttctacagctattctacagctggaagcacaagtttactctcacgtcgcccgttttcttagttaataattggaaacttgcagcaccctttcaaagccctcaccacggggaaggcactcatcagctgagggccctgaggtatgaccacctacccacagagcatctgctggaggtgctggggtctctcctgaagcccaggaaacacggatatgcacacacaatagttcaacctcaggtgcagaaggctggcggccacaaagtccattctgagacctatgggaggtcagagatgggaagaggaatccacagattaaagtgcttgccacacaagggtgaggaccagagttcagatcctcgggagctacacgaagttgtgtgtgtgtgtgtgtgtgtgtgtgtgtgtgttatctgcctctaagtccagcatttgggaagattggagacagggctagctatctgggctagccaaactgttgagtccctgcctcagtaaactaaaatggagggccactgagaaaggccctgaccctccccccacacgcatacccacccacccacaccatacacacagacacacacatgggggtgggggcaggggagtgaggggcaggggggtgggggagggcacaggaacatgcatgcatgcacacacacgagtgtattcccaaaaagaataagtgctgataaaggaagtctaacatacagcttgaatagagcgggtggccaattaactcttgcagctttgaatgaattatgtcagtgtccacatcagtcaaatattccaggtgacccgatttccccacgtggctctccactctaccttcatagttcctatcactttcaataactgtgtggaagtgcagtatttttccatactgacagcatgctagttacagtcgcactttggaggctgcttgttggtggtttaagtggcagctggaagcttttcaatgccaagacaatggcctggtatgattgtgcagagtcaaccaggcaaacaagatgcacctgggtcctctaacgtggtctccaaaagtaactttcctttagtaaaatcagagttgaggccatgctgaggatagggaaatgctcagccagcaggtacctttctgtcgagcagaagaatgtgagagcaaccccaacccatgtgagaaacaagaaaacaaagacaagcatgatggtagacggcaagcccagtgctgggtaggtggaaacacagatcgctggggcttgctggccaaccaggatagtccatttgctcagggccattccacagccagcctttcttttctcttcaccatgagcactgatgtctcatgtagcctcactatttgatttctttcttttttggtttttcgagacagggtttctctgtgtagctttggagcctatcctggcactcgctctggagaccaggctggccttgaactcacagagatccgcctgcctctgcttcccgagtgctgggattaaaggcatgtgccaccaccgccccgcactatttgatttcttatagctcaaatcgagaaacccaagagagctttgccaccgggtgatggagctaacagggaatcaggcaagttgttaactggaggagtgaactgaggtgcagccaagaaggaggaagggcagacccagtaaggcagcaaaggaagccagcacaagactcggcaggaaggatggtcaccatccgggggcaagagctcatccctggggacaccagcagcagggaagtgtggacataattcaaactacaagaacacaactcgagctggggaggtggctcacccaaaaacctgggcatacagcctgcacatataaccctagcactgtaaaaacctgtaaccccagcactgtaaaaacatgtaaccccagcactgtaaaaacctgtaaccccggcactgtaaaaacatgtaaccccggcactgtaaaaacctgtaaccccagtattgtaaaaacatgtaacgccggcactgtaaaaacatgtaaccccggcactgtaaaaacatgtaatcccagcactgtaaaaacctgtaaccccggcactgtaaaaacatgtaaccccggcactgtaaaatcatgtaaccccggcactgtaaaaacatgtaaccccggcactgtaaaaacatgtaaccccggcactgtaaaaacatgtaaccccagcactgtaaaaacctgtaaccccggcactgtaaaaacatgtaaccccggcactgtaaaaacctgtaaccccagtattgtaaaaacatgtaacgccggcactgtaaaaacatgtaaccccggcactgtaaaaacctgtaaccccggcactgtaaaaacatgtaaccccggcactgtaaaaacctgtaaccccagtattgtaaaaacatgtaacgccggcactgtaaaaacatgtaaccccggcactgtaaaaacatgtaatcccagcactgtaaaaacctgtaaccccggcactgtaaaaacatgtaaccccggcactgtaaaatcatgtaaccccggcactgtaaaaacatgtaaccccggcactgtaaaaacatgtaaccccggcactgtaaaaacatgtaaccccagcactgtaaaaacctgtaaccccggcactgtaaaaacatgtaaccccggcactgtaaaatcatgtaaccccggcactgtaaaaacatgtaaccccggcactgtaaaaacatgtaaccccggcactgtaaaaacatgtaaccccagcactgtaaaaacctgtaaccccggcactgtaaaaacatgtaaccccggcactgtaaaaacatgtaaccccagcactgtaaaaacctgtaaccccggcactgtaaaaacatgtaaccccggcactgtaaaaacatgtaaccccggcactgtaaaaacatgtaaccccggcactgtaaaatcatgtaaccccggcactgtaaaaacatgtaaccccggcactgtaaaaacatgtaaccccggcactgtaaaaacacgtaatcccggcactgtaaaaacatgtaaccccagcactgtaaaaacatgtaaccccagcactgtaaaaacctgtaatcccagcactggggagatccctgaggctcactggccattgtagcctacttggtgttccccaggtccctctgagaggccctatcccaaaatatagtcaatagtttaccctgcccacacatactttagaaaaagaaaagaactcttagatgaaggcaaaaacttgacaaggaaggagatctagtaaactataaggaaatagttttgtttttttgggggggctttgtttcctgatatatcaaagtgctccaagggggtcattgataaacagggaggtgggaactgaggaggctgaaatggagagtttcccacaccactaggagatcaagtttacaaacgactgcgttagaacacagataccattagcaatgtcaattgtgacttgcaggtatgtttcaaacataatgtctattccagaaccgacagcattctttccaacgtgggcagcacttccaggggctggggcctgaacctggccctttctgtatattaatttaatttacaattagagttagtattcgggcatcggtactggcctgtccttggggttctgataggatatgccctcagcaccacctgtgcagtcactatgttcccttttaaaaggccccccctctctctcctctctctcccttcctccctccctccctccctccctccctccctccctccctccctccccctctctctcttcctcatcctctcctctccccctctctgcccctctcttctcttctacagctcctgtccccagaggccaggctcccttctcccctccccccttttcccatttactttccctcaaaaaaacaaaaacaaaaacaaaaccctccacccaagctctgttgcatggcatctctctcttggggctgctttttaaaatttacaaccattggtgtaatcctcataacgggcctattatagaaccttgacatcctcaaacgccagccaaggaaagtgaggctcagagagagacacactacatctcagggtatttgcctggccagcaactgctttggaatccaaacccaggttccatggaaggacaaaggacagcattcatgagaaatggtgcttgtgtctgtgctcaaaactgagtttcttatcaccagagacatgactggattttaacataaagacaacaaaccaaagctggagagatggctcagtggttaagagcatttgctgctctcctgaagaacctggactcaattcccagaatccacagggttggctcacaaccatctgcacctccagttccaggggatctaatgccctcttctagtctcagtgggcagcaggcatacatgtggtgcacagacatacaagcaagccaaatgcttatacacataaaatattattaaaaataaccaaaatcctactaccatcattgctaccaccacacctgaccctccagctcagatttgtgctgttcacactactctatggctttggtagcactgatgatcttagacatgctatttaatctgcccaagacgtaatctctacattttgccaaaatgaagccatggtatgtaacatactcgtatgctttctcttggtgtgtgtgtgtgtgtgtgtgtgtgtgtgtgtgtgtgtgtgtgtgtgtgtgtgtatatgttgtatgtgtatgtatgtatgtatgtttgtgtgtgtgtgtgtgtgtgtgtgtgtgtgtgtgtatggtgtgtgtgtgtgtgtgtgttgtgtgtatatgttgtatgtgtatgtatgtatgtttgtgtgtgtgtgtgtgtatggtgtgtgtgtgtgtgtgtatggtgtgtgtgtgtgtgtgtgtgtgttgtgtgtatatgttgtatgtgtatgtatgtatgtttgtgtgtgtgtgtgtgtgtgtgtgtgtatatggtgtgtgtgtgtgtgtgtgtgtgtgtgtgtgtgtgtgtgtgtatgtatgtttgtgtgtatggtgtgtgtgtgtgtgtgttctgtctctgatccgacctcaccagtttctggggttataggtgttctggtagttcaaaccgaagtcaccatgcctaggcaggaagcgctttatctagcgttgtctcagcagcctcgtgctctgatagtgttcacttttaacactctgaactcattcagcattcatctctggtctgcttgggacacttcagacactcttggggacatgaaattgagagtggtgtggcctgcagcctcaaggcccccatccaaagcaaacacacataggaaaggccctgtggaagagaaacacagccatgtgagagagtgtggggctggcaccagccgtttgctctcgcgttcatctgccaagtgggtcgtgtagcatagccacggacaagctgcagaagtggtgagatggaatcttgcactcagagctctaccctgttctacaggaaacggaaaggccctgaaggtctccacactacagctgtgccaccttcctacccggcaatgctgagccttcactggagcactcctgtgcatgctccttttagtcttactgaattcacgactccaaacacttttgaagattggtagttttattgcatgtgagtcattcctcagcacaaatatctaataaaatcccgctgacctctgttggataagatggcatgagctcccctgcgagaagataaccagaatcagaatcaaatcaaacaaacaaaaacccaatttccaaagcgtcttttcctggaggaagttttgaaaggaacaatggtgcagtaagaagaggaaaggcagggccctcatgtcaagagtccatgcctcttccctgcatacacggggaaactgaggcaggcatgaagccaacagctggtcactgcaggacaagtgtttgtgacctcaaggggtctgcttccttccagttaagatgactccctaactaatgaccgaacactccttttcaagagtctgaacttgagttttcagtctattcaagtccgtgatttctgtggctgagaagaccgaatggcttgataatttttggagatgggacttctcgggctgaggcatccctttctgtgacagttcctgtaggagtcggggtctcacaagacacccctgcagaagtcagctgagtgtgttaaagagatttattcccagacaaattggcttataaatgtgtacagtccatgaaggcaaggcagaaggcagtctggaggggctttctctgtcttccctggggacgtttgtcatggatgctctcccaggtgctcctccccctgactagcatcggacgtgtttgcttctaacacacgccctccttcctcttcatttacttaatgcagcagccccaagggctagtaaaacccagaattggacacttgagattaggaggttaagaaaactgccacacagccaggcctcataactccacaggcaactttttactggctggttatttcttaaagctccatttaagagtctctggagagccatcatccttccttgtactccatcaagagaggagccccaagatgaagccagccctgactgtacgggtctcagcaagcgtgggtgtgatccttcagccttcattaaggaaggatttctaggaaatgaatggagaagtaaaagttgtagtcaggctatcaggtataaaggaatataaaatgccactcaaggaccttaatttcaatcctaatgtgttttaagtgcctcatttaaaacatctcagaacttgtggaagtttgcctttttttctttttggaaatttcacttttacttactgtttgtttctgaccacttctcacactaagaaaaaaaaataaaaataaaaacctcaggaagctcccgctggcactgttatctggcagaagcccagtaggagactgctgtggtgtccagaggggctcaacaccaggtggagccgggcaggaaggcaggagtgcccgtccccgggagccacacagagctgagttcttcctcgttccccagagatgtcccaggtcggctggcttctcttcaggttgacgatcagtgccccatccaccccgagcctaaacccccatggactgagcctgagacatacccagcagctgttatcagggtaggaggttgagggtagagagagccctatgacatgctgttaagtcactagaggattcaaggtcgttaaacaaagacatgtcacccaggattttataaggtgttagaacatctgggtggggcacccagggactgtcaaggaaagccagcagccatcaggaggaggaggagagatgcaagctctggctcactctctgtctagacacactgtacccagcggaagcattcctcatgcttcctgggtccttagtggcacctccctcctgcagcatgcctgctagtcctgcctatagccctggaacccctccttggaacaaggctgtcccaagaggtcaggggagggttgcaagatcacagaggtagactgtgcaccggctgcaggacggcaggggaggctgcgctgtgtcttccgctgagaggaggtgccgtgttctctgttctggtttggtgaggtggatagaggggtgggtgcagttagaaggggagagtcattcttagaaataaagacattaaggccttctcgcatatacccggcgccggtaagaacatagactagcttccatcggggtcccgaaccgcgtggggctctagttacctaggcaggagtcgaaatgccagttcctccccttgattctctgaagctccattccacaatcagaaaagtctctcctcactgacatttttgacgagggacccatggccaagcacccacagccacagagtttggagtttgtagaaagtgatttctggggctggagaggtggctcaatggttaagagcatttgttgctcttacaaaggacacaggttcaattcccagcatctacctgaggctcacaagacctgtaactgcagttgcaggggatcagactccctgtcgactcccagggcaccagcacacacaaagttcacataaatgatgcaggcgcacactcacacacataaacaaaaaactagaaagtgagtctttctggtctacaatgatgctgagacaaagtgtaagcagctaagctataccctcaacaggaattgccagagcacggatttggagccaggtagtctggttatcggggccacactccatgttacctggcttctgcaaggctaaattgttattcttttgtttaaaaagaagaaaagagaaatgctgagacatgagacataagactataagtttattataaggcccggtagagtagggagactaagaagaggaacaggggtaaatggctgaccgccatggtgggtcgccatagagagagcgcataggtgagagagagagtagagaggaagctgagaggaaacagagcggggaaacagagagagggaacagagtgtaaatgggcaggggcatatcttttaaaggggttctctgtatctgtgtgcagacttagttcccatggaaccttggcctgaccagggtactgcctgttccaccaggtaacaggggcaggccagcataatgcctgaacctttcataaatgaaatcaaactcagaaatcctccatgaggagtaatcgctaacatgccgagtgagtcttcagaacaagccgccgccctcaagcgttgcttctaaagctagaacaagcaatacatcacggtgtaactcggtagactctaaagttttgaacatgaaccttaaagttcgtcaacatgtaaatacaatcttatatttgcatatatttgcatagacgatctctgtgcaccagatacctgtcttcttacacacacgtacataacattatattggtataagaattttaaaggaagaaaaaaagtagaatttctgatcattatgcctgctcttcaggaactatttttgtcattcagtattgagggccactttgctattgaaaagtcatctctggctaacagatgatccctgtcttattctgtcacaaagtcttgtgattctttcagcccagtctgtaaaaggagccatcagatgacacagaactgccactgtgggacagaaggttcagaaatggactgatgtctgtggaagcagccgtggcactttagctctctgctttctacccctgcatcatcagtgccctggccctgggtcctcgcagatgcctggtgggggctagtctctcttctgtctgtgtcccatgctctgaactgagctacctgagcctaagagtgtgtgtgtgtgtgtgtctgtgtatgtgtgtgtgtgtctgtgtgtgtgtgtgtgtctgtgtgtgtatgtgtgtgtatatctgtgtgtgtgtgtctgtgtgtgtatatctgtgtctgtgtgtgtatatcttcgtgtgtgtatatctgtgtgtgtatgagtatctttctctctctctctctctgtgtgtgtgtctgtgtgtgtgtgtgtctgtgtgtgtatgtgtgtgtatatctgtgtgtgtgtgtctgtgtgtgtatatctgtgtctgtgtgtgtatttcttcgtgtgtgtatatctgtgtgtgtatgagtatctctctctctctctctctctctgtgtgtgtgtgtgtgtgtgtgtgtctgtgtgtgtgtgtgagtgtgtctgtgtgtgtgtgtgtgtgtgtgtctgtgtgtgtgtgtgtctgtgtgtgtgtgtgtctgtgtgtgtgtgtgtgtgtgtgtgtgtgtgtgtttatgacatttcaggctgaatcttctacacaattatcaaggcaccctttgctcaacatccacacggagccattaacataccagacatggaggttattggaagttgcaatgggcaacacttggggccatgttttacgtaagactggagtgtacttggagctgagtagggttctatccaagcatggagttggactccagaagggcagttcccctcttagggagcaaacattttgcatccttccacacacacccaaggagagcagagccaggctgaggctagctcgacagtcacctgccagtgaagtatccatctgaaacaggtgtgtgctttggctttcttattggaagatgggcctcagggctcactcacttcctctgattcagtcactcaggcccactctacacacagaccccagctccgcccctcccataccttctttccacttctgggtctccctgaccacttatgagggagggccattcccaggccagaaaaggcaggcggggaagtctgcccctgtggggctgaagggcagctgtttatattataattaaggttttacagcataaactgaaatgtagcttggctatttcaacaaggcactggaggtaattaccactgctagaggcgttctccactgccaattatttttctctaattgaatgactcaggccacagtatctgagacagggagaggaagaacttgctctcactgggacgctccttcagagtctcagaagagcaagaggcctgactaccacgctctcactgccctgtttcaacagccctcttgggtgggtgggacagagtggaggaaggcccgatctggagccctaccactcgctagctcagagcgagtgagtgccccgtgtctgttccctcatctatagagggtgagaagtaaatgggacccttcacgggtcagctcttcacggtttctaaaacaatccttgagacaatcaacttgctgagatgaaaggtttgtacagcctggcctcactgcctcccaggtttccagcataggataggtccccggtggcacggcactgtggaagccttggaagaagagagctgtttaccccagggatgctaagaacagtaagagagacaggaaggaggcagggccccaatatcctctccaagacatgtctccaatgacttaacttcctcctagtggacctaaactgaaacttctgtcaacagcaccacaggccaaagactgatatagcacctttgataaccaatgtgataatcaatcacattggtaagtgtgattgataacacacttaccaatccatggtaattctaaacccagcacatggagaacccttcataatatctgacctaaggaaatgatgctgacagacataaccaggcaggaatccatgcttgtcttttgtctacacatgagggagaaactgaggcagaagggacatctaaatcccacagaaagaacttgggaaatgagggaaataaatctcgtggctacttggtccaaaagcagtgaatccctttcattgtggcaggagcaaatgccttcccctaaggagttgacacatttctgtgatgcccggccccagaggacttgagttcacttctgcgttcacctccatatctttaaaacgttaccagaattctgcacggcactccatctcgggctcgggcaatctcatcattgatagagcaccctggcttgcagcgttttgactctcttcagtcttactctctgtcacatctttcggtccttacaaccatctgagaaagaacagtggcccttttggtttagcaaccaaacaactgggccaagcaggatcccaaaagctcaagctagacccaaactagtctccagtctctgcttctggctttccctgcagctcctctggaaggaagccacctcggctcccacacaaacctgtcccatagcccaacacctttgattttgaaattataccatgtggtcatagcatctcagaagccagggaagatattctctgcctttgatgtacacatatgtattagttatggctgtggcaaaatgtcaaaagtgacttatggaagagaacttgtcttaacttaatggttccagagcaaggccataatgtcagggcagcatggcagcaggtgttcatggcagggagttcagagatgacatctccaagcacaagcgggaaacagagagtgacctagaagtggggaaggcttaaacctgcaaaccctgtcttcagtattagagttcctcagcactgcttgcctcctgacagtttggctctataacctctccaaataacactaccaagcagggactgaatattcaaatacctgagactggggggaacatccctcgccccaaaccaccacattgcaagtctctctgggaatctttaaaatacaggttccagagccacatctccagggattctaagtgtctaggtctaagaggagcccaggaatgtgatgtttaacaaggtccccagatttttatgttttctgtggctcaaggaccattctttgaaaggcaatagacttgggaagctaaaatggaaaatagctctatgcaaatatcacctgtgtgacctgctgagtgttggtttccttatatgcaagttagtatataatttccgagaattaaataagataatatgtgtgaagtattaaacacaatgcccagaaaatgcaaagtgtgccgtgatatttgtaatcacgaaacacggcggctgctgtagtcccaaatattattgaaaaagcctgtgactacagcttgaagtcttctcaggtggtgccattacatctatagaaaactgagaaatcaaagaagcataagtaggatttgataaattgaaatcaccctttattagaactgattcatttagcctgatgtagctgccttgggtgagggtattggcagctgctccctagtcagcagcactgatgaacggtggggaaaggtggatggtggcgatgccaagagagcttggaaactgatttgagtcagtgtgatctgcatggaagcccgcagcagccagctctgacggccaagaggatgtgctccttcttcctaaagcccctctaccccacgggaactctgagttcaagcacaccctggcatacgaggccgcctccaagagattttcttggacctgtgtggagtgaactgtgctagataatggtcttgctagagcaagctcatcctgcaattgtcccagggactggaagaagaaataaaaacaaatccttccacctactgcaggatctctacccatgtggcaatggaagcccctctctgacacctcacatcccacacaccctgactctacctgactcttcttcttttaaaaatgtcaatatttattgactgttcaaaataatgggtttcattacgacactgtcatacgtgtatgcaatgcaccttgaccatgttcacctcccgttatcctcttgtctccccccagacctcccggatttccccttccccttcccgaccccctacatttccatctctttattttagaacccacgcatgagagaaaatgtgctgtttgtctctctgtgtctggcttttttcacttaacatgacaatctccagttccaacttttttcttcaatatgcctttagaatttgacagaaatgtctactcagatataagagaactatcagcaacaacggtggtctaactgaaactggtggcctgaaccttgtcaaagagacttaaaaactgttgtttcacgcaggccacctacattgctctgtgaggccaaatagacccatacactaaaattatagactagaaacacccttggctgcactttgacaacttggcaactctgtcttcagtgacctggtgacaaattagcatttcaagactagcaagcttgcaggtgcatcttgcttgggacttgaaaggaagagagctgcacatctgagtcccagcatgcatctggtgagagttctactctagagagctggcttacaaaccactcctcagccacctccatagtgtgtatagagagaccctggaaatctcacttaactaatgccttctcccctaacatttctaattttagacaattctctccaggaacaatattcagcaatctgcccctggaatccaaaccccctggtgggagaacccaagcccctggtgggagaaccctagccctggaaaatgggccttccttcctcctcttacaattccttactgtttgagcaactcggggctcattccttggaattctccagccacctacccaccttgatcttctctcactcagagatttagatatcagatttctgaaccataagatctgtctcatggttaattttcttcttcctagaaaaatggccatttcacaggccacccctgattctgtgactatgccaactcctaaatctctgtttccaatccctggtcttggcttgaacatcaaacttccaattcacggtctgataaacaactccaaataactggaccagttcagagcaggtgtgtgtccctgccaggtgtgctcccctctttgatattcccacctcagtgaaggacagcctcccgcctcacgcaatttgcttaggctctaaacccaatcgccacctcctcccctatgcagagcccatctctgtaacctcaggccccctggcataagtcttgctactccaggtccacttctcacagtcagacttttatccttttagaccaaaattcctagtgttgttgcccaggctagcacaacagcacccaactggtttctgcttctattcttggacccctacagtcctttctctgcaaggcagcgtaagtgaggttctcactcacttcatgctacctctccccctcgtcacaagacctcaactttctacttcccttgcacaacactcagagtgaaacaaaaactccctcccctgtcttcttcccatctcttgctcatcttgtgagtccccaggaccctcagctcctgtttccttgcctctaatgccctctctccacccacccaagcctcttcatgtagtacctgagtgggctcccgcagactatcccaacctcagcgactcatcctgctttatttcatagacttgggacattatagtattagacaagcatcagcctccgtgtctatttactagtcctactagattctaagttttctgagggcaaagattattggtgatccagacaaggtccttcctagtgcctgatacataacagatgcttaatagttatgtcttaagcaaatgaatgaactgacaggtgtgtgaggcaggctctctttctgcgtcttttttttttttttaagagttcaatgaacagttaatacttgaaaccctgggaccaacagtttaatgacagtgggtggggtggggctggaagcatatggaaataggaatctgtaacacttagaacactttccttagtgtgattatccctacttccttctcctgccaggatgtagcccgaagctcagctccacctttccattttgttcatccagaacatatgtcttcacatttcatatagtgaccatgacatctgcagagctgggatatcattaccacacacacacacacacacacacacacacacacacacacacacacacacacacactcatacacactctcacacacatacacaatcacaatacactcacactcattcattcacactctcacactcatgcacactcacacatacaggcactagtaatgaggaaataataagagaatttcattaagagcttacagtgaaccaaggacaattttgaactttgaagttttcttttcctccatagctggcttaccaacctagcaagcagatatagacttgacagataagaaaacggaggcacaaatgagactaagtaacgtttacagttcaaatagtcagagtgaagggtctgtgcctacaaggtttgtatcctcacttgccttgtctgccccctgtcctgacagctcaaactctgatgaattccgtaaacccaagggcatccagccttaagatggtcccataacccaggatctcctcggtcaatgtgatcctaccaagaatgtgaccaagtcactgatagtggaattctattccttcactggtctctaagggttcttcccatccctggggcagccagatgaagctcacttgtctcacatttttaggtgaacaacttggatgtgtgtagcaattcatttattttcaacctcccttgttagcccacctccacctgataaaccggagtcctgatgcctcagactcaccaccaccctagaccctgcccagctgttagctaaacttaaaaacatgcctcctggaaattggcccagggttttcactggcaagaaacatgaaactaagatcctgtgtgattgttcttcggtcctggctgtggcatgtacaagctgctgcttgaatagcgacaggcactctccaagggtgctggccagaggcaaaggagcaggagggctcacttcccaagtaataaaacaagtggctccatgggagaaattccaagaggccttacaggccatctgggaagccagactcacatgaaggcggggtattaatgagttcactagacccaagataaatgataaaggggtgttttattggggagcaggttacacagatacgagtaaagaaccactgtggctccctgctccagaagatgccgtctctacccttcagatgtgatccacgtcccctacccaagagagagagcctgctcctcacctctacctccaggtcacttccacaacttaagccatgcccaaaggggtgtggccaccaacacattcactggcaaggtgagatgctactataattccactttcagtctaaataagaaggttttaagcctgatgtgaaaagtatatacaatgataacaaatgtcaggcatattcccggaaaaggaaaggtaaacacacacagattaaacaatatatacacatacacactcacaagctacagttgaggctctggggcttcgacggtcatgtctctcactcacctactcttcctctggagtctccagatgctttaaggggacccaaagtcccctctcacagctatgcatgactaaccctcaacaggaccagaaatagagactgcctgtgctccatactactctcaaaagttggtctggtgtcagtatggaagccacgtttgccatgttttccacaaaagtggattaaaaccaggacacatcaacaagtagggacagaaaaatacttgattgtcggactctagtctgtcccagagagaaggtgatagagggaagcaaattgagacgaagatgctctattctaggagcttgttaggagcagccagggatacccagtccatttcaatatgtgctccagtccgtgtccccatcacatgggccactaacctgaaacactagtaaaactcctttcaaggactgatgagttgtctatccttcagaaatcccaaccactgtgggcttctgtccccttatcttcaaagtcaggcactctgaaacagctccgagctcctacatagctctagaaatcaaggggttaagaagatgctacagggggaatgttaggggtgaaacccttggctcattgtgggatgtttctagcaatttccacaaaaataagcactaaggttcccctcccccataaccttttaaattataagtataaattatatgtccttgggcttttaaattgagcaaaagcaattgaggtatgtgctgggggaaggggggctgactgcacataaatttcattcttacccaagatatgtttactgtcactcaccaggtgaatgacgtacgatcatcctcttggttgttcttaaagttactcaggagtggctggttgccaacaagcgtggtggacattttacagaatgcagaggacagatgacgcactgtctttatgtttaggggaaaaaaactggacacattaaaaaaaaatctcaagctaatacaggaaatttagaatcatactgtaaatttttttaactgtaagacccaactctctgtgtgtttcaatgttgactaactacagaagtccaactgctgcaataggaacataaatgtgctgcggtattgtcactcagtggcacaactgaaaccaggtaatcgctggctctgtgcaaatagacaaagcgtatttaccttagcacggttatcaaacacattgtctttagggagcatctggcctttctgataatgctaaggtaggccgttttaatttcagtaccgcatagacgtttgctcttagactccacaaccttctggatgaggcatgggggaagctccttgccaaaaatagctaatatttcaagacagtaaaaacagaacattgaagcatggttcatctgagcttgagctctgttgttggacatgtcctgtccccatggaacctgcccgcagatggtctagaactaaccgccactaacatttagccagtgcttgctttctctgagcacagttctgagaacctcactgaatccttagcacaaccctagaagataagtcctgcctaccattcctatggaaactgaggcacagaagaggaaacatctagctttgcttccatggacacagtggtggggggacatcatttgcgcccaggtgaactagaccaagggtactaggtaggcacatcttacaatcatttcctgaaagcaaacaaggaaactaagatttccatcctgtggagtctcccttctctaaagcaagtgttcataagccctaagttgccgcaggtggagcaaaccacaatgaagcaagcggaccttttgcatgcttaggctacacattgaggtttgcatgtagggagcaggaagtggtttctcttggatctccccatgtcactgatgcttcacagtgtatgtgaacatctaaggccaacagtaaaagtgactcttgttgaaaagcccaccgtgatccagtcacgaaaaccactgcatactggaagaatggagcctctgggcagagctgtgcttgcctagactggccttgacctgtagatcaaagctgtgaccttgttcctgagaagcaccaagggggaggaaccactatgccaggctctgtgctttccatggaggaagctgaaaggcagctttgccgtgtggggagatggaaagcacagttttcagagggacgacctccagctggcctttgcagtcggctttctaggactctggttctccaattttagtctcgcctgcacatttcttaagaatgctttgaattgcaggccctttgttcacttaggaccaagctttcaggatgctgatgaggatggtccatcctttaagcatcctctacagaacagaggctccacaccatcaccaagaacatcacctttaggagagcacaggcagcacagaaaatgagactacagaatgcatcccaagaccgcgcaaaggagcaggagagcacagagtcatctttttgacgtttacttgattaaccctgactaatacttccctttctatctagtataagttctaccacaatgacctaaggacaagctttctcagccacttctcccacaaatagccttcaaaagcccactcccctcttcttctgtctccagctgctgcttcctctatataccactggtttctattgctctggttttgaagaaattcctttttcatcaacactgacaataaaacagatcttagagttattcagcccaacatctttactccatagccagggaaaagaggacctcaggaagccagacggttgaccagagacacagacaggggtcatacatggggcaaccccgcaggcagaccccacagagccctaattcacagacccacccttctccctatgatgtcacgtcactctagtggacagccactgcagagcgtgtctagacgcccttccctggctttcccattaaagtagtgctgaaaacactttttttcttcctttttttttttctttcaatcttcaaaaatgaatggttgtctcatatagcaaaaatacagcaagcagctggaaaaatccactgtgcacagacagaaaaaagttataaataaatagaatggtgaaaacagattaaacatcccagttgaaaatgagaaatgaagataaaagacatgacccgccctgactagcaggctccatggcacagccccttcctggccacatgacatttgaattcataggactgtggactgtgagagacagcaaaaaaaaaaaaaaaaaatctcagatgttacaagggggctaagccaactcctcatcttgagatagagaaaactgaagcccagagacatgaggacactagccggaggccacacagtccctacttagtagtcatttgggtgctaatcttctggcctctgaaggaagcagatagatgagttatatgacccctggtgaagaatgcttgtcatctagtagcttggtatctgtcctagtcatctttctgttgctgagatgaacagcaaaatcaacttgggtaggaagctacattcagcttacattttcaggtcacactacatcctgagtgaagccagggtgctgactctaggcgggaacctggatgggggactgaagaagagatgcaggagcactacttactcactggctttctccccatggcttgctcagccatcttatacaaccccaggaccatctacctgggatggccccacccacagagggctgggccctcccatgtcagccattaatcaagaaagtgtctctacagacttgcctacaagtcaatttgatggaggcaactcctcatttgacagtccctcatcccagatgactctagcttgtgtcaagttggctcaaaactatccagcgcagtgtctttccattgtggttaaaaacaaaaccaaaaaccaccaacaacaaaaacaagctttaaacagatcaccttctggggaaatgtaatcatagcttctaatgagtacgaagttgccaaggcatttgttgttgttgttacattgcctctgtatggtgtaaatcaactagccatcactgaccagcaacagttatcgagaacagtggtcagacacagataattgctctgttgctgagattaacaccttatcaccctctcaggacatttatgaatcttgccatccctacaaagacccacaaagggggggactgtacattctggttgtctccatgtcttcagcctcctacacacaaacaatcattgccctacatcctgcatttaataagaggcctgaactgtgtggtagcagaagtcacagggaagacaggagacccctgtcccccccccatctctcctcttctctctctctctctctctctctctctctctctctctctctctctctgtctctctcatctctggcacttcttgctgaggagtagtgagctttagagccatggctaaaggacaaaggccctgtgatgctggcaactgtgggatgagaaattaccaagcttgaagaatctctactttttcgagttagcaagaagttaccctgaaagctgggatcctggcttgtcactctgaagggtcccttgcaggactgctgcctgcagactaagggagagagcagggagactcttcaactagaaacacggggaactcaaaggatcgggaaactcacaagactcatgttcagtaagcaagaccctggggtggagctgtctgcaagttcatgggggacttgagagggacagcttttgtgaatcatcaccctcagctcagtaagtgactttgatgctgcaggtgctgctgtcatcccgcagtggttagcaaccccaatacactcattccacatggtgggagagagacccaactcctacaaagcctggcactcgctgcctcttccccaaagtccaaaccagcttttcacgtgagctgtccccaactaccagattccagcaggagaggtcagaaaccagagcgtgatgaaactggctggggagaagccaggagaagaaggcattctggttcgtttgctacatcagaggaggaaagccaacctcagcggtgttctcaggacattctaactaaaggaggcttttcctgggacaattcttccaggaataagacaccccccacccaaataaaaaacatcaaacgggcaacaaataattttaccattaccaggtaatatgcgttaattgctccgtttatataccgaggctgacataccattagagactgggtatgcactgtaactagagcattaataaatttaaaatgtgcctattaggatgacagctttggaggtgcaaaggagtaaacagttatcacttggcagcagccgctctcaccccatctgccgagactatgcatacattttcagcttcctgagcaatgattaggcctgtcagaacctctttaaccttctaactgctggtccccactggccgtaattagagactaatgaattcagaagatgcaggccgtgaggaaaactgccttgacagtttgtgtacaaattaagccccaattacttcaagcatcttttgcattgtggatacaagtctctgctattatttttgaatatggtcattttagcagaacggagaacttggctaatatattttgtcgtttttatggctcgtcataaagaacacacatactggagtaggtcatgaatttgtgaaataaactattgcagattataaaaagaaattaatctcattttgggaatacccttcttttttcatcctcctgctggatccactgataatatggttattgttattcagatattgtatgctgaggaaggagcctgactaactagcacgttgtgtgggtttagaccctgaggaaggagctagtgtgagaaggcatctcttgactgccaatcctgctgtgagagactttgagggtcagaaaccctgacctcacccgctcctccacactctaggagtgggacatgactttaaagcccgccactaagatctcacgttgtttaagaataagatcatgagctatcacccaatcttgtcccatctcatctgccatcctgtccagatattcattatgtgtcatttaagggggacctctccccccactctacactggatatggccacttaaggactctgcctatttggctttagaaagccagtggggtgggtgggcatgcttgcctgtcgctcactgctcttacagccattgctgtagtaaaaaaaaaaaaaaaaaaaaaaaaaaaaaaaaaaaaaaaaaaaaaaccactgctgccattgctgctgcctcccagagctggtcttgccatctgtgtcggtcatactgctccaggcagctcagagatccccgtgctggcggagagggggttatctttgctgacagccagttgccgttgaagtttgtgcgcgtctccactcacagtccgctactggactgctctggttaagacccttccttctgtctccttcatctgcccagctccagccttatctaaagtagacagaataacactctctcctcaaaacacaaaagcatatgtcttcatcgaataaacaagtgaggattccctacccgtggcaaagaaggctctacagatacggtcaagtgaggcttcttgagagcagggcgttgtccagctaggtcctctgtgatcacagaacttggaggaggaagttagaaggatgtggaagcaagcagtcgggtgggctagagaagaggccacagccatggagtgaaggtgactgctaaaagctggaaaggttcagggtaagagcgtcccatctacgagctctggaagactagccctgccaacactttgagtttaggcttccaaggcccagaaatgtgagataatatacacacattgttttaagtcactgagttcactgtaatttgtttcaggagcaatagggaacactatgctgtgttctcaagaaacaaaggtttatttgtattatttgtttgtattattattaattatagttcactctgcataaactttcacattctatcttcttgtctctgagatcgaaataaactatttgtagtagccctccctcccaccactgcgactaacacctgagagagacaacttcggaaagaagaatttcatagtttccatccgtctgtctgtctgtctgtccatcctaaaaggcagagagaactggggctggtgggggaatgcctgtggcaaccaagttcttttctcctctttatttttcttggtctctagagtactaggtggcactcaacactcagggtggccgcccccttagtcagtcctctctggaaacaggagctgagcacccctggcttccctagagcggaagaagggactgtaccccgcgtgggcagggcagtgctgacagtccagaccccagagtgcaaaaccctgcagcccagcacagccaagccatgaccacgcctcctgcgaggaggccacgccccctgagacactgcctcaagacactccctccgacctctgacctcgggaactgatgctgtaggtctccgggaacaaggccaccagcatggcctgcagcgtgtccagcccaccgtagggtagcagaccttgcaagatcagaagcaaaatacttttaactgcgaatcatcttaataagcgaggtgggagcctagcagttacaaggcggtcttaacagctctaaagggctcctttccacagccctctccctcccctccctctcctccttctcttttccttgctttgtccttcatctctctcactcaccaatcctgtcaggggctgttgagtctccaggttatcagactgaggcagcgccatctctgtagccacagacatattaccaaagctccctctctaactggccctcactgcatgctagcctcctgtctcgtcttactctactctgttctggcccacacacctccggctgaagagccctgcttcacagctcatggatgtgcaggaatcgtagcttggggaccctcttgggaggctgcctttgggtttctttctaagttaaagatggagcgtaggtctagatagacctcgactgacaaggaccaaagggctggtttgctgactgtgattaaatgaagcattgggtcactcctcaggcagcctgtctccttgctgcttggcagcggctggggtttcccttctgtggcgtcagcctttataaaacgggaggaggcaaggtcctgcctgtgagatcccttgcaatatgctagtttgcaacctatggacttaaaggaccctctgataaaatccaagcaactctgttctctctataaaaatttaaaatcctattaattgcccatatggcctgcctcctaattttgaatcttttcctggacctaactcttcagaagcaaagcaataactagacaaagggacacatgatcaaaattgctttttgtctgtctttcaagaccagacccaagctccacagagaaggccctggaagtttacccagagacagactggtcaagggtgaacaactgtgcgagtcaggaatctgtgtgtgtgtgtgtgtgtgtgtgtgtgtgtgtgtgtgtgtgtgcgtgtgcgtgtgcatgtgtgtgtgtgcatgtgtgtgtgtgcgtgtgcatgtgtgtgtgtgtgtgtgtgtgtgtgtgcgcgcgtgtgcatgtgtgtgtgtgtgtgtgcatgtgtgtgtgtgtgtgtgcatgtgtgtgtgtgtgtgcgtgtgtgtgtgtgcgcgcgcgcgtgtgtgtgtgtgtgtatgtgtgtatgtgtgtgtgtgtgtgtgtgtgtgtgtgcgtgtgtgtgtgtgtgtgtgtgtgtgtgtgtgtgtgcgtgtgcgtgtgtgtgcgtttgtgtgtgcattccagggtgtgtgcatgagtgtacacatatgggctttgggacacatctcactgagttagcagctctattttatcacactacactgagttcattttgcttcagcaagccagtcctctggctcatcagaccatgcttttggttggacaacctatactgctcacacatgagacaaaatgctattttcttaagactcatcattccagaaactattaaatcctcactagatgacagctgttctctcagtcagaacggcagaggaccttgggggctgccagctatctctccttctgtttccatccattgtcacactcctctcttctcaacaccactctgtaggctcccacaggaacctagacgaagctgctccaatcaagagagaagtcattggtttcttcgcatggattaatttttgaggaggttctgggcatcaaacccagggccctacgcaacctaacaagtcgcccttgctccagccgcctcgtttctttgtttcctgagtaaaagtgtgatatggggagctgaagcaacttctttcttttttggttgtgaaaccaaaatcaagaaaagcaagaattattaatttactctaacacctccaaatcatttgaactaacactggcaggccattatcttcaggtgtctatttttacaacttaagtttttattagtcaaataagtcaaatgatacactcatcctagcttagatacatgaaatctttctaggttctgcagcccagagatcccatggcaaagtcagagatgagtaggatgataggcaaggaccagaagctggcggttggacttgctctgttggttggcctgattctctcagtcctgttcacccctctgtcttaataagtgagactctaagtaggagttcacttgaggaaaattaatccccactaaattttttgctttaaacctctggatatgataccatcaggattggtcagccagctgtgttgtggaaagccaggttccctcgggccaaggacttatcatcatgacatctgacaaaagaagttgtattgacaggactatctagtctgagccctgactgacattggcacttcccctggtgtggcttgtcctgacagggaaagctggcctgtcagcctagaagtccacttgtctctgcctccctagctcttggattacaagtgaatgctaccacacctagcttttttttttttttagttttatttattttatgtgtatgaattttttgcctacatgtatgtgtgtgtgtgtaccgtgtgcatgtttggtacctgtggcattcagaagaagatagtgaatctcttggaactggagttacagatggtcataaaatatcttgtaggtactaggaaccgaactccagtcctctgaaagaacaagtgcccttaaccactgagacatttctctagcccaagttttacacccgactctttaaaatataggttctggggctggagagatagctcagaggttaagatctccgactgctcttccagaggtcctgagttcaattcccagcaaccacatggtggctcacaaccatctgtaatgagatctggtgccctcttctggtgtgcagatatacatggaagcagaatattgtatatgtaataaataaattttaaaaaatgtgggttctggggacaaaactcaggtcctagtgtttgttgggcaaccactctactgactgagatgtcactctgatccctgctcctcaagggttctcacttcctgccatctcccccaactgccacaaaccccgttgtgtcctttcctcttgcaggtgcacgtaaccatcaccccaggaccccaggctctaacactaggctgtagcttgccctttactgttccttaccactgtgtcttctctaaatttcaagctgcatctgaacaaggattctttctcctatgcttctgattggaccctagggcattgccagagcctgcaaagtggcaagtgcttctcggattcttgtgtctctgctcctcttcattgaagtttatactaggaagaccagacaccaacccagagcctgcagaaatgcaaatcttctccctctgtcaggctggaaggagccaggttgtaccctcctgaaaaacacaaaaagagaaggctgtgtcttcctggcgatgtttagtccattggcattcctccttcctctaggtcttactgtggccaaattcaagaaacagatgttcacattaaaaaaaattctcccctgagtcagtgtggctgtttatccaattttcaccctgccacccagacttaggctctgccctgtgaggcctgaacaagtcggaatgtttgactctggtccagggaagagttgaagagaagaaagggaggggaccccacagtgagattctggggaggagatgacactctaatggttaggatgtagggatggaggctcaccttcccaccaatagccgctggttatccctagctgggaacctatgctccagtgaggcttctcaggtagaatccagtctatggctgccacaccacagcagttcccatcctgcactactaccccattggtttttcgagactgggtttctctgtgtagctttggagcctatcctggcactctctctggagaccaggctggcctcaaactcacagagatctgcctgtctctgcctcccgagtgctgggattaaaggcgtccgccatcaacgcccagcagcttcaagttttctaagccgatgactccagggtgccatggctctctgtccccagtccccctagcgtgctgagtctatctgattgttgctgagctgtgggggagccatcaggacccatgatgcctctctttagttatcttcagactacttggtttgccttggctccaacattcttagtaagttgcctgtgcaaggagaacagaggaggagagaacctccttaacccaatttactgcatctcagacgtgagcattggaagctcaactctgatggcaacatctgcaccaagcactcgctcccagggaccagccgctagagtcttcttgtcttaagcatgatcaccatgtatattcacaaataaaaacatgaaatgttctgacagccaagcaaagcatgaagaattcagctccctaaacaggaaaacatgaacaccagccttgctgtcatgcttccgagaaaaccctttcattcccagactccacccccaccccagccccaggtctggttgagttcatcctaggagacatgtttctacaccagggcaagagtccatctggagaaggaaggatactagtttttaaggactggcttttttttttaatgataaaatcagacttttccagagaggatgtcaaaggaagtgttccagaggcagctggagagaggaagcagcagttccctggcaacagccctgtgagcctcagggctggctctgagtcagtctccagggcctctggcttcatcatcctcttaccttcacactcctgctccactcaaggcaaacttgagacgagccaagcctgcttatgctcttggatggttcagtcctcgagcccctccagtgcccagcattgcctgtgatgtctttagtccttggttcactcatcactgactatatcttcccctgtgttaaactctgtggctctagctaatgctggctgttgggtttctcctggtcacatggcctcttggtctttagcataaatgaaatcccacctcatattatacaagagcccctcagtagtgccttctcgaggagctcatcccgtaacaaatgagtgtgatggagtgtcctcaacgtgaggagccatcagtaaggatattgttgtagattttgactcctccactcagggttctgggaagacagcttcctcccacccttgatgctggtgtctttttctctgactaattggcattgactaacttgatacacgtggttaggttgaaggaccttttaactttatttcaaattgtaaaatgccttcatgtttgaaaacttaaagtaaagtggctcatgcagattcagtgtaagattctgtctggtgcccctgtaacacatagaacctaacacacacacacacacacacacacgcacgcacgcacgcacgcacgcacgcacgcacacacatacacacacacacttacacacacacaacacacacacacacacacacacacgcacgcacgcacgcacgcacgcacgcacgcacgcacgcatgcacacacacacacttacacactttctcttctctccttttcctctttcacccccctcttctttctctctcccttcctccctttcttccttccaactcctacttccaagccacaagatgaatagttgatctactgtacatatcttccttgactcagacccagagcaataggaccaatcaaacatttacgtactgaaccctccaaaaccaaaaccatgatccaaatgaaagttttctttctcaagctgatttgtctaggactagggacagaaatctgggcaacacagtgtgtgcatttcaaactcatttccataccatcacattagaagaaggaacatgaccccaagattagctctatcttagaggcaaaacagttaagagaatatgttttgtacccgaattttattactcatttttacttaagtgatgcgttagatgagttggggttctttgcctaccgtcggtgtccagttttccatgccacagcacagcattgtcatctacaatgttcacacttgaatgctgcacaactgaattttgaaaatcacaaagtcatctgttttaagaaaatttgtgtaatttcatggtgagtagcctttactgctatcctttacattcatacattctaccaccaacaaatcagacatatagataatcagctgatttgtagaattgtatttttgcatataatttcaggggctgggcaatttatagaacctaccctaccagaaggctggcaattcagggaggcattggtatgtctcacatgctgtgggacaatctctgtgcactgtaaatgttcattgctctcattgttaataaaaagctgattggccgatagctggggaggaagagattggacaagataacctgacacagagagatttctgggaagaagaagggcagagtcagaggagctgccagccagacactgagggagcaggagattaatgtgcaatgctaataaaggtacttccacgtggcagagtgtaaataaggaatatggatcaacttaaaatgtaagtgcgagttaatagtaagcctgagccattgtccgagcatttataaataatactaagtctctgtgtggtaatttgaaagcaactgccgggacagggagtagacagtctagacagaaaaactctgcctaaaaacggtgcccagtgtagggcactggatgaagccttaatctaatctttgtcaataaaaaatcgggattgaaatattaaggcaagaacctgaaagatcagagagcagggagctgctgccagttacttcctacctcttcagttcctccatccaaaagggccaagatcttctctgtgccccaccttactacttcctgtctcctctctctgcagtcctccaaactctatagttagctagtggctagctccaccctctgactccaagcaagctttattcatcatgaaaggacctgctcccctttcggcagccataacagccgaacatgtgcttgccataaacttgccttggtcacgtagaggtcagatgcctgtctcgtgacaaggaacccatcagaagttagtcactagaaagtcagatgactgcctcgtgacaaggaaccaatcagaagttagctggtggcactatgctttacgaccctgggtgtgctttacggacaagcacacagcaatgatgtagagagcatagcaaccaccctgggagggcctatggaccataacaaccagttgaccaatcaacacagggcaagccctccaagcctggaggcacaccaatcgtgagcctgtccgtacccctagacactccccttacgctgccctataagatctcttgggaggccctaggagccgtcttttgccagccatccaccatggcagatgggtgaaagacccgagctaacatggggttagctcgttaaattacaataaagcctcgtgcagtttgcagcaagctctccaatcctcctggtgattggggtgaccgcaaacgtggcctgggaccccgggtacttgagttttctgggggtctaacaatcaaaacacaatcaaaacttcacacaacactcacagtcttgagtgtgaaatgaataggtggaaaacagacagtgtttctacatggcagactcttctctgcttcaggacacccaggtgtttgctcctaggctcctcaccatgttgggtgaggtggatggagggtcatctacttcactcagactccactgatggaaatgttagccacatcttagaatacagtaacatctagatgggggtttgtcctgacatcttctcccactcatgaattgacaaaaatcaatcatttgaaacagacaaagagctccagccttctcctttctttgtttcctgagtaaaaagtttgacgtctggggctgaggcaacttctctcagactgtggaaccaaaatcaagaaaagcaaaaattagtttactccaagagctccaaatcattaaaccaacactggcaggccattatcttcaggtgtctatttttatgacttaagtttttattagtcaatgttctgttacacccacccatcctagcttagctacatgaaatatttattaagtttttcaacaaatgtggggaatcccttcattttagctagatctcccgaaatatctaaaccagaaaaccaactggtccccagtatgaaacagtgggaagtcttgcaagtccttttggcacagagtagtggaacaaaactctctaagttctttctgtatctggaaaacatttcagggccatcccaccaggttccagaaaaaaaacattgggaaaattaatcagtttcattcaaactagaaataatgctataagaataagctgaaaggagcactacaagagggatgcttcttttgcgtatccgttttgaggattcagtcactttaaaattgtatgtctatgagtgttttgcctgcatgtgtatctgtgcaccgtgtgtgtgcagtgctcaaagaggccagaagatggcgttggagccctggaactggagttagaaacagttgtgagccaccatgtgggtgctggggactgaatccaggtcctctgcaagagcagcaaatgctcttaaccactgagccgtctctccagtcccaacatagttctctgatactgtagcaggaacctttcgagaagaaacagtgcactgagaggacacccacgcaagagaaaggtgagtttctcttcctaactctttgcctttaaatattatttttatggcttcttggcttaggaaaaagactctttaaaaactgtgaccccgtgtcagggagaaaccacggatctcttaaactaatggctgtcgttgaaaactcctttagtgatgctcagccacaaagggtggaaataaagaaggaagaatgagcttcgcaatgaacgaccttcggggaaggagactattcatgctaattagtagctctttccttgtgtgcattaggccatgccacggagaacaatgggcacattgtggtaaacatcaagaccagcctcaagtacagttagcaaaattttagaaaactcaagctagggagtttttcatgagccggtgacttgctgctcccggtatacggcacaatagtgtctctcctaatggcttttagcttttgccactgccaacttttatatttaaaatccatacaattatggacaatttgtgagcattatgagggttcccgttttttgcaccaagtcttactgattcgagctagcttttagccttagcaaatcaaatgcattttgcttacaacactagattcatcctcacatgctccactttattcttatcattagtattccttattatgcatatttaatttaagaatgcattttctccattaaaaaattagaataagctgaaaagacgttccggaaggggaagcgtttgctgcagtttgcctttattaaccgtgtaagccctgatgggttcttcccggagttgccagcaagagacagaaaggttcaaaagcagaaaatagaataaaccaagattggcttgaaaaatcacagctctccttaacataatgatagcatgcccaggcatcctgttcaaataagaggatgcttagaaaatgaaacttctgttttgtgtgaatggggaaagggtgtaaatttgcttgcattcttcagtcgattgccatgaattaggtttctttaaaaccccatccaagccaggcatggcagcacactcctctagtcccagcccttggacaagagggatcaagaatcagttgtaagtcactctcagctacactgcaagttcaatgtcatcttggactacaggagacaccttctcaaaagtgtaaaaaacaaaacagcgaatccacagacataccttgcaaaagtgaaatgaagggaaagaaggtgtgtgtgcattcctgtctacagggacttcagaaacaatctcccaaatgcccgtaccttagggagtgcagtcctatcctgtctctagccaacccccaaagtgggaacactacaggaccaagacttagctttatattgaagttctttagcaaaaggattgggcatttgaggaaaaaaaatttaaaagtaaagagcaagcaaccaatatctttcccagctttgcaattattgattgaaaatgaccaaccaagaaatgattgtcatcaatatactgcctaataagtttgactctctccacttccagaccatggttactagcttaacttgctgtttgaaatcattagaccagacaaaagaactcaggtattatccttatgagattaggagaagggtctcctttcccttgccacctcaccatgtggccttgagaagagtccacacccatgtagctctggactgcagagaacagtcagtgctaactccacagactatgggagcagagaacaacgctcactggccaatgaataccctgcttccctattctcattggcttaagaccttcagatccatagagacatcagttgagtttgtctctatcatgaaagctaaataaatcacactactcatcctcactgaaaactcctgacctcatcttactggggctacatgagcttcatcccacactgccagagtaaaaaccccagcagtccccgtatcagtgaggatgcacccactcactctctacctcagtttttccttctgaaaaatagggcaataacatcccctattgcacccgtgtgtgtgaggactgtaggtcaagccttagacagcactatttgtacatctctgttttctgtgcttttggagtccctaagagctttctccccagccagcaactgcttccccagcatctgggaggttacagttaccatctcctcctgaatttaaaaccaaaaagagaacaaggtcctaagtggattgaagtcagccctgctgggctctctgctcagccactcactgctcagatatggtcatctccttactctttctgggccctcatattctcaaagaaacaagaatacttaggcccaataagcatggtgaaaataatgacataaacagattaactaattagctgactttctcaaagccattttttccccttggttttgctacaaccctgatgaaaaaaaaccaaacatcaaaaataagtaaacgtgttcttctctgttatcttggcaattaaaccaatcaagagcacagtgacgtcatagaggactggtgccagcatttgcacaatccctctcagcaataatgtgcacattttctactgcttttaatacctggtctctcagactgttcttttttatttaaattacatcagttttcccctctttcttcccttcagcccctccaaagtcccatccctctaactctttccatgacccccatctactctcaaattgagagcaacatctctcctaattattattgttaatatgtggtgtgtgtgtgtgtgtagagagagagatagaaatgcatatctatgctccaatatataaatacaagctgtggaatcccatttgttgtcgatgtgtatatgatttcagagctgaccacttggtattagataaccagtgagggcactccctcctggaagatgctaactgtccctccctcagaaaccatcagtagtttcttgtcctaggatggcactcagagattttcgttccctctgcttcagaatgtctatgatatcgccattcttgaggtaaaatagaaggggaatcttctagcaatctggataatagtgtattatactcataccaataactcgtggcaaaattctgagatctcaaattaaaataacagaaatagatcccatttgtcatctgtcaattgtccttcttatagagatccaggaacccaagtgtctctttactctgaatattatttttttccattcatttatttatctcataaagtcatgcacaattatgatacagaatacagtatgttcacaatggcatggctaaattaaaccaattagcatgttatatcacacatattcatcatttttgttttgagaacacttaaaagtatactatctcacaacttttaaaatatagcatattgttatcaaccatatttatcatgctctcagtagacctcaagacttcagagagtccatgcctcttgtccaactgcaaaaaatatggaacacttcatgaatttgcgtgtcatccttgcacaggggccatgctaatcttctctgtatcgttccaattttagtatatgtgctgccaaagtgaacactgaatattatttttaaattaaaaatgtgtgtgcacctgtgtgtggcatcgcactcgtgtgagggtcggggaacatcttctgggcattagttctttcctggggattgaacttgggtctccacacttcccaatgagcctccctactggtccacgcatattatttgtaacaatatattaaggtggacgtctcactcctgtgtgccacgtagatggattttacaacagggataaaagcctgtgaattgatgcctctcagctctctggtgaggactgggtctgattaatcctggtgctattatgtcatgaattctatccacttctagaagaaagtcatatctgctgaagtacaattatctaagactgatgacagaacaaaggcatcattagaaaatgcatttggcatagaccccgagatagtcccatcctgacattccacttagcaggctcatggaattcccctcagctaggtacactttccgacagtggacagcaaagggccgctaatgctcactcattatatgcagaataatgtaaccggtagcaaaggaggctctggagttgctcgatggagacgggtctacaacaacagtacttgtccccccagtcagctggagagaggccagatttggtgacacttgcccaaactagacaaagacccatctgtcatcaggcatgagatcctctctctcctcatctctcccctccaaaagtctactcagaagcagggccgaatgaagaggacaactggcagtcagcagcctgcttgctacaggagggggtgagcatggaagctccccaaagtctggaaccttccaccctgctttgagctttttctgcttctgctgaattcttcacatcttggttggtttctatagaataccagcccaaaacagctcatcccagccctactgcacacccagccctactgtgtgccaagccccatagccccatctgaattcttcatctcatggcataaagactttaccttcacaccaactccagcattcgagaatcttcaatgcctcctacccccccacacatgtacattacacacacacacacacacacacacacacacacacacactcactcacacacacacacacacacacacacacactcacacacattcacacacacccacttactcacaggtgtacaagccaacctccacagcagcaattaaaaacaatacaacatcaggcaggacaaatgaccatgagcaaaggagtgccatttgtgtagctctcacaatacagagaatacaataacccagaagaaggaaaataagctttactaatttccccagtgtctaatgtaaatattattcactaagagcattcaaagtatacaatttatttttgaggaaaatgaatgtcaatgaaactgtcactatgggcaagacagagtatattcaaaacaccccgattccacagtgtcccctggtcctctgcaatggcttcttggttgttagtttgacatacctgtgaagaggaaacctcagttaaagaatggcctcccttgggctgacctgtggccgggtctgtgggctgtttctttgactgatggtcgacaggggatggcccaagctgactgcagtcctggctggataaaaaggcagctgaacaagccacggggagcaagttagtaagcagccctccatagtttctacttcagttcctgccttgaattcctccctcaagtctctgccctgatgtcccttcatggtggactgtaagctgtgagatgaaattaattctttttcacagcaacagaaagtaaactagaacacccaccagttttccctctgttgtcattagtgactgacaacttgcagctgtaaatcagctgtaatgtcaccgcctatataaatgtaattacattgaatgtgcctatttcatctctggtcttttcacttagcaagataactctgagattattccatattggtggatatatcaataaattgagggttatttttcttattccttctcattgaggactaatactttattgtatggaagggtgataattcctttatcacttgttggcaggcatttggattgtttctacttggggaatgtttcagttaagccaccaagatcattttgcataagatctgtagctggagtttctttctagtctggtcctctgcccttcagccccaaataaacacatagagacatattaattataaatctgttggccaatggctagggcttcttgctggctagctgtctcttaattattaacccataactactaatctatgtatttctacatggccttatcttaccagagaatgcctggcacatcctatcttccagtctctacatggcatctcccctacggcttccctccctcttcctttccccagaattttcctcttctagtcatcccacctaagcttcctgactggctattggacatcaaccaataagagaaacatatatccagaaggatatggcccatcaaagacctcctgtgagcatatgttcatccccttgttgtaagtacttgggagtggaagggatggtgtggtaggaagtccatgttttcctgttggaccaataacagcttttaaacatgggccccctctttgcaatgtgtgagggtgccatggctgtgcctcctccctgccatcacttggttccatatgtctttaattctgggcattttagtgtcatgttgtggcatctctttgtattgtctgttgcctcttcctgtatgttcattgtatctctttctttgaggggcctattcaaattttttccttttttccccaagttgaggtatctttttgttaacctgagacttttcatgcattgcacatacaggttttttgtaaaagtgtataacacaatacatccatcttgcagcttgccttcctgtggacctgtggtcttgtttgagggacaagagcctgacattttgattaagtttgacactcatcttttttccatggtagtttattttacatcctattaagaaacaatttcctgtttcacagtctccaaaatctccccccccccacatgctttcttctagaaactttttatagttttagcttttacatttagatctatagtctaaaattattttaaaagcatagtaataatgttattactaagttaaccggaatcattctagtcagatggcactgtgagactgacccctggtttctcaaggtctgagcttctgttcttgtttggttttcctttggtcttagaggaggagacagcaggccagaaaggagacccgaaacatgggtgtgcacatggtgtgaccactttggagtttttgtgcttccaattttattttccatggctttatgtgtagactttcatgttctggaatattttgaaaactttctcgtggtattttttaaaccaatcgtttaaaagcaagcagggaatcacatctaattaacatgtaattaacatgtagaggctaaggcccagttttgggtttcccttgtttgcggctgattgttttaaacactgtggctctgaaccgttggtttccagttgtttgcaatgctgtcctgactgaatttgggtgaaattggacttctccgatatctgtttggggtaaattatgacttgtggctaccggatgagaacagatcactctcagagcttgcaaaccatcccacagggaatgttccaaggagcagacctcctggggtttccagaggcagactggcaggggtggaggctggggggctgggagggttgttgctgttgctgttggttttggtttttgttgagagacagagtctcacctgttccaggccactctgggtcccttggctttatagccaaggacgaccttgaatttctgatcctcctgccccacttcttaagtgctggggttccaggcatgcattactgtaccctactatccttgctttctatggtgctggggattgaacccagggctgggcaagctttctactcactaagtcatatcccaaggatatggaattaatttcagcaaacatgttaataggaaaaaagaagatgttgctttcatttgcatttcctcgacttttgtgaaactgagtattttctcatatgtgtttttgatattttatatcttcttactcaagcccgtattctacttcttttttcccatgagtctttgttgatgtccaaatgttttctatatattaacttgtgtcaacctattgtcatgcactatcctacttttgccagaagtgttttgaatgttttcttcttggttttctgtcatttaatttgtttaagattatttctaacctgcagagggtgcaactctgtaagtcaaatttattcagttgtattcaatttttttcatattgtattggcatacatttatggatacataatgaaaggttcaggttttgacgctgatcggctctacctctttaagagacagaccctgccccctgacaacagtcagggcacgcaagaaaacgggtcacctgccacgcatgaggactctgggcatgcgcagtctttcctttaaaagctcagctttcctgcttcactctctctaatattttatttggttttccaagacagtgtttctctgtgaaacagtcctggctatcctggaactcgctttgtagaacaagctggactcaaggagctcctcctgctcctgtctcctgagtgctgggactggtgtgcgccgcagcctttaggacctttgtctacgatttaatttgctgtgggtcatggaggaggtatcttagctctagtctcttacgaagcagaatttgaagccatgccgttttcaagccttgggtagagatagatcccggagtgtcagggtgagtgggtagcaaggcgccacaggaagatgtaaccacagagcaggttaagggtgccacagaggctgaagcaaacagcgggtgagcccagtgctgcagggtctggagtctgcgcctctgagtggcgctgcccaatgggataattaatctcagctgtcggctggataaaatctagaatcacctgaagacacaggcctctgggcatgcctgtgtggcgtcatggtgactggattactgaggccaggggaccgggccactgtggggagtagcatcatctcctgggctggtaccccgggactgtgtaaagaggagggagccatctgagcacccatgcgcctgtctgtctgcttcctgagtgtggatgtgatgtgaccagctggtcccagctcctgcggcttgactaccccgtgatggactgaacccttgaactgtgaccccagacaaggcctgcctccctacaccgcctttgtcagcatatttttaccatagcaaccggaaaggaaagtgatgtctctaagcgcccccgagggctgcttaggacagtcaagcaggtgccacggagtggaagaactaactgctggagctgcgctctggcagtggggggctgctgcggaggtcttgtgtgtcatcgagctcctgctgcagccgctgagctgagggtgcacctcccgtacctgggttgcttggcacctcccgtacctgggttgcttggggactgttcccccagcagccaatcttgagtctcggttgtgcataaatgcagcggctaccatgagatttaaaaaaaaaaaaaaaaaaagaatttcccctttggctgtcctgaaaagctcatgtataaaggtaaagtcataataattacaactagttgcagaaaacaattgggaatttatagataactcacattaaattaatatgtctcttaggggactatcatctctgtaatactgtgctttgatttttatggatataacagaagcctgagtttcatttgttttttttttttttttaataatgtctctcagtaaaatttttcaattggttttatgtggcttttgtagaacttccattaaatttatatctctgtgttttaaattgtttctctggtgggcagaacattctttttcattatgcttttaactggtcgtttctggcactcatggtaaagtttccatatatttatcttgcaaccaaccatctttctaaacttaaaaacattttagttcctcctcgtggcttcttaagcagacaatcacattatatgtaagtaacaagaatttcccttcttctccaataataatatttattgtttcttttctcaccctttccctggcagtggcttccaaatagcattcagtaagtaattagtacagcatcgcccttacctttcctctaactcttgtaagaaggcttctctgatttcactttgaggtgtgatatggactgtgggtttcagagaaaaatcttaagctgcctcaaggtaaaacatttgtattgctagattacaaagagattctaaaatggatgactgatgctcagtttgtatggtttttgtcttgactatctctccccagacgttgagtgtttgactgtgagaaagatgccccactttcggcctgaagcttttgtgtgtgtgagagtggtcttgttttggcatgtgtatgtatgcatgtgtgcatacatgtgtggagaggcatgtgcatggtcagtctctgggtgttcctccaagtccacaagaacctggcgctcaccaattccactagcctgggcctgccttccttccttccttccttccttccttccttccttccttccttccttccttccttcctcccctccttcttccttcctcctcctcctcctccctccctccctcccttctttctttctttctttctttctttctttctttctttctttcttcctttcttatttgtgtgggtggaagggaggctactttgcttacatgtacatacctgatggctgcagaggccagaagagggagcagattccttgggactagggttccagagagtcgtgagtcaccttaagggtggtcagaatcaaactcaggctgtaagaacagccaggactcttgtcccctgagccaccattccagccctccagcatgacctttacatgagagtgcctgtgatcccactgagatctttgagtttttgaagctggctttctttatcaactttactaactgataaatctccccagagcttgatgcttgcctaactgggccacaagctctctctggacagccaactgcttctccagagatggagcctttaattggccctgcacctaggacatgagaatgttcttctggtcagacaggctgtctaccatctgatggtgttctgtgtcccttcaaagccctggtattctggccaatcttgctgccattgcaacagtgtgatgtatatgcagttgggctatattagaagacgacttgttgtaggtgttggttctctacttctaccacgtgtcttttactcactgaaccatcaggacagggtggtcttgagcctctgatcctcctgcctccacctcctgagtgctagcattgcattcatgcacccccctgcctcatctctgcagtgctggcgttaaacctagggcctcgtgtgtgctaggtaggtaccctgtcaattgaggggcaccctcaggcagatcggaactgcatgacaccttcatccataagcacctcaaaccagtattaccagcccccctttttaagtctcctcctccctacaaatctctcctctggccatgagtgtcctaactgtccacccagtcaagccaaatgggacccctcggccagccttcctcactctgaaatgcttgtgagacctctctcccagattctctcctgtgtcccatctgcagccctgacccaaatctttcccttctgctaccccctgcccccccacccccccccccgcctcagcctctgttctgagtggttgcccatgagctgtgactttccggacctcttggcttttccacatactgcccacatttctccctccttaaaaataaaacttgtctgccctgctcttgaccctgtcaaacatttctgagcataaccgtcaactgagatcttcgctctggggaagttgtattaaatcaagtttggggcgaaaacgaagaatcctcggtcgcccttgagatgtgggttctctcctcaaactccaccagctccaccttctcatcccttgtccccccaacccccacgcagtgctgtccctgtcttctttccactgattcatctgcaccctcctccacatcttgcaaccccaaatctaactttgaaatggcctcagaagtcgcctattctctgaaccattttcctgatacctctctcaacacatggccctgtttacttcttttccatagtctggtgtagacttccatgcctttagaataagaatacctgtctattttggggtctgtttccatgtagttgaacataaccttggggcagtccctccttcccttatttccttacacaaaagacacttttttagcacaaagattagtgaaacagtcttcacccccccccaagaaataaacacagagatgtacagacagacacacaggataaccaccaagtacattacagcagtagtggtgtttatcttagagtcacagacagcaaacacattgccttgactagtgctgacagtttattgaagacattaaagtttaggggtgataattaggggccagtgggctctccaaaggaaaccccctatgacccatgttctctcaggtttgagtcactattttcattcaatttcgcatccagatccttcctctgagtgcccgagacagttgccaaagggcagaatagctagttcacactctgccagcctacaaaatcgctgctcagtcaagccccatccctgaactcagcctcttgcctgagaatgcagtcagcagatacgtgaggagaaataatgcatgaaggcatggccgctggccacatggcagcgtccagggagatgatatatcctttcatcttgctcagaatccatcattcgtcaagacccggtggagccaagatggttcgtgacctttcctgcttcacaagcacccaagaagatcatacagagagtaatccctgtctgtgtcacacagccttactgctcacaagatggaacacctatattgtcctcaagctctctgagcttcacatacaccatctttaaaataagaatcgggtttgtggagttggctttgtcagtgaaatgcttgttttacaagtaccgggatctggttttcacactccaggacccacactttaaaaggcagacatggtggcacccatatgtaatctcaattctgggaggtggagacaagtagagcccagctagcttaccctcatctgcatgctccaggccaatgaagagacccagactcaatacccagaggaatggttgccagggagacaaagctgaggctgtcctccagtcccccaaatgcatgcatacacatttgtacatgcacacacacacacacacacacacacacacacacacacacaccaggagaagtttcttacatgtgatctaaaatgccccattaagcccatgccacacaggatcttagcttcctgtcattgagggttacttagttcatggtctctgctacaagaagaaatgggttccttccatgggtttattgggagggggttgttatgtgggacttctcttcaatgatgcctagaattccattttcatcccaaactcaatgcatatccattcttcaagacccattcaataaacactaattcagtatggccagagttaccccaaaccactgacccacccactggggaggaggagcacaggttggacccatggtcccagctggcttgcagttgcctatgactggattcactccctagattcccatctaggccctcaccacctgagccttgctccaggcccaacactaatgaccctcctcagccagttcttttctgaacactaacacacctggccattcagagaccccatcagcaccgagagaagagagatacgaatgggtccctcctgtgacccttggtgagggaagatagaacaaagcagaagaactgggaagtcagtaaggtcagagagcaggaggtgtccagattagttctaagccaaggggcaggagccggaggtcagtccctggctggaacacaaagccagcccagaaactcaccagaagcaggggggaagaggagcaggcacaggcagcagccgcatactccttcctcgagacaaaggctagtgtccctattgtcccacctcttgctcttcctaacaaccattgagtcaacttcccttttaacttatgagaaaatgaattaccagtgtctctgaaacgacctctccccttgtaaaagtccctgaattctattgatccagtttacctgagcccatttggaaactgctaacaccaggacacatgggttttcttcttcttcttctttttaatgacatgttcaacattggagatggtctacccacactttcaagaccaaaaagaatgctcttaactgttttttagtttttttttttaaatgcgtcaaattaacaggcttaacttgtacatagcacttcttcctctgcagacatgttcccagaaggctgatgagatggctaacacataaagccatgtgccctgcatgcttggtgacctgcagaaagaacctatataaagatggaaggagagaaccaactctcaaagttatcctctgaacctctacacacatgcagtgacccatgaagctgtccccataaacgtcacacgcgcatgaacaatagtactaaataatgttttaaagtgctaaccggatactcaaaaataaacagaagtccccctaaaacagaagcctgtgtgctcaacccacgctgggtgacttcttagctccatgtatcaggaggtgacattctcaggactctggatggaggcctgtgtgctcagctcacgctgggtgacttcttagctccatgcagcagtaggtgacagtctcaggactctggatggagccctgtcctttcatcacccaggcccgtcttgtgctactgacaataaagacagagtggcttaaactgcagaagtccactttttactggctcatagttacgggggatgaacagccaagatcaaggtcccagcctacgtggcctctgcctggcttacagccaaccacttttaccttgtgtccttgcattggtgaaggacggagagaacagaccctgaagaaggcagatcctgccatgatttccagctcaggacaccacctagctgggttatttcctcactcctgtcatcatgtggggtcagagcttcaacttgaactacagaggactcagcttagtctatggtactaaaaagaaatacacagcagatttatttgtattgaagtcacttacccagtgtcagaaaatgacgatgaagatttatcaagttgtaccctgtgttactcttgctgctggagcccaggaagggtgaggcccccgcccctgttgtatttgtgtgtgagcgcattttcacttacgagttttgaaatgtaaatatatgagcacgtgtgtataggggctacggcttgatggcaggtggcaggtgtccatctttccttctgagacagtagcttttatcagcctggagctcacctatttggctaggttagcaggcctggggtctccaggctctctgcctccccagcacagggatacagaggatcaaactcaaggctctgatccttgcacagcagcactttgctggcccaccagttcttcggctgtttctggagagtgtgctgaggacatgggggttagaatgtgttggctcactatttgaaacttctccgagaacagcaatttgtgaaaggacaagaaaagaaaaaaagaaaacatggtgccttgggaagtgctaaattctagctcttagattaccagggaagtacataaaacatggagccttgtaatggaaatggtactattctcttctttgttccctctctatttccttctctctgtctctacacacacacacacacacacacacacacacacacacacacacacacacgaaagagagagggagagagagagagagagagagagagaggaagagagagagagagagagggaaggaggaggaggagggagggagggagggagggagagatctattccaccaaatttgtctcataccttctttccttctcatccctccctccttccattcctcctaccctgcttcttctttcttctcttcatggccccatatcaatcaccaattttgttataaatgctacagaatactttcatttgcacaagctttacttgtatacacatagaaaaatgtaaatgtttaagacaagcatggtggtgtacactcagtctcaagatttgggaggtggaggatggggataaggagtttaaagtcatcctacctagcagcaagtctgaggctagcctgggctacataagactctatttcaaatatatctatcatataacatatatatatgtatatacatatatatatatatatatatatatatatatatatctcaaggataaaaatttcaatcttgagtgaaacatcacaaatgtttgtagctcaactgcttcttgccgtgtggccttgaacagactacttaagttcttagagctctgtttctttattctaacactggaaataataacattaactccctgaagagcttacttctaggctaaaatgagccagagcatataaagcaccagcaggaggcccagccaatagtgtttactatctatccttacattggtctccagcccctgttggattcctaatacatgactccaactaagacaatgcggcctgggtaaggaaccacttagtgccagttcacatagcctcttcctcaactcattgttagtggtggggattctgggtggtgtgaactgggccctactgggccagctggccctgtgtgcttcaggaagcatgtgtgacagcagagctctgctgtgataaccagcagtggtcactttgaacatctgggatctcttcttgttgaactgaaggctccccgtgacaaggttctgagaacactgcaagagtcttccttcagcaaagaatgtgcttataaaaaggatggcatgggacagccacaccctccactgtcacccagggcaatctgactctctactttccacactgcaacctggaagagagctcctcaccctccacccagtctctctcaccatcaccccttttgcaataactacggagggctgggcagcaataactgtcactcgatgcaaccgttagaccaacaggtctgctgagatggcaggctggcagcaagtcagaaaggtctgtcccgacactgctgcctgtaggtgacccttgagcagacactgttgtcattgaccagtccctcttgaagaatgtctccattgagattacctagtgcctagcaggccttggcagcctggttctgctcaggatgtcacacaggcacatcacagatggaggacaccttggcacaactcatcaccagggctgggcactggtcccttgggggcctagcgcaggtcagagtggcttctcaattaacataggcgaggactctgggctaaaggctgtgccacattgtggcaagagtcaagcgcgcatccttcatctacagtaacaagccccatgtccaccaggttctgtggatttaacatccattatttcatttgacttcctctgctggtgtgtgccaatattagcaaatatgattataatactaagaagtaatctatctttttgctgagagccctctctgttccagctaataggccagctgtcctggatagattgcatcagtctgtcttagtctgttttctgctgctataacaggcaccacagactgagttatctataaagcataagggtttattcaagtcattgttcctgaggtctaagctcatggagccacaacgggaggctcttattaagtacacagtgcagaacattgtggtgatgcaaccatgggaaccccatctccaccacctcatatagttctagttaccaaatacttgccaggtccacagacaacaatcaatgacatccaggcattatgcatccagtgcatccactcatagcaagttttccataacagccctgtgattgtccttactggaaggggaggaaaccaacactccaggggactcagtgttctatccccattttacaaataagaactgcaaaaagacccagggcagaatagctcaggtcaaggtgagagcctggccctcagagggttttgctaagaacatgatgtccaagtccccagagggtcttagccatttgctgtggtgatcaccactcattttcccaagcccaaagaggtcagccacagcagccaatcagctgtgcccacgagccagcatctgtacacggaaacaaagacgtcttataactgaaggcgagcactgcgagcccagttggaaatgactaacagggttgttttgcttctgaggcaagagctagaatgtacaactagttagcaccagttctactggcagccctggctacataatgcaggctacggcatttggcagtgcctcttaaatttggcacacggcatgctcctcctggacccacgagataacataaccaaatgttttctgatgctgcaagaaacgagtattttgcaggtagaaggaaatgcaaacatccccatgcctcccaatcccaggagcaaaatgtttcactctctcttgacccttccagaggttagatgtgagcaggagcccagataaatggtcacaatgcaaacaaagtcacggaaataaatgcatctctgatctatgcagactggtgatgccaaatataccatctgcaccatttctcaggatgagtccaattgtgcttctctgcatgtcccaagcaacgagaatgtggccatgttcttttttttttttttttccagaggaaggcatgcatcatttgatgctctcattttgttttgttttgttttttttcttcagactcacagacaatggatggcagttatattttcctaggttaggttgagttgggacagagaaacaaaaaccatagaaattagtaggaagtatgtacaggacagctctgcactcttttcctgctcagttacattcacttaacccaagcatcattagcttccgatggtgctggtgtgtgtgtgtgtgtgtgtgtgtgtgtgtgtgtgtgtgtgtgtgttaggtcctatgttagcatgcaggggtaagtcaaataggggctcacactacagggacacttcgtatgcttagtgtgaattatggataaacttcttagacaaaaaaaaaaaaaaacaaaagcaagcaaacacctgaactagagtctctaaagaggatcattttcagtacctcgcaaagatacaactgaccatactaacagagcatggctcacctgcctgagctgtgagcctttcaaaacaaaaggaagcttctaggttaaacattggcaaatattttcggcaaggagcttgagagtgagtgttcttccattgtgctggtcagtacccatcttcatacctcacctctgccaaggtgagcagaacgcagtcagggactgtgaaaaccacagagccaactgtacttcagtgacctttcactgtcaaaggaataagcagggccctggatgtggcctgtgcgtgcagctgtctaagcccgggtctgtatgagtcttgtgtcactgagataggcttggggagacaacttgtgtgtgatggcggccaccaccgcccacagtgtgaaaagggacattcttctctttatcacctttgcttttgatcaatacagtacaaaaaaaaaaaaaaagagaaaacccttttctttcaatcatctagtgctgaaaactattttatcagttcctcaatgcaatctatatatacttacattgaatcagatcaaaatcttgtgggaaattcataatctaggcagtagtgtttctcgaggtgtgggagattgaccagatatagtgaattcataaatcagtctggttacattctggatttctctgtcagatcagaagagtaaatcattacactatatcactgcattttatggtctgatattgaaaatgagaagtgtgtacatacacatatatacattctcctgaaaatttttacacttcaaaagtaggttaaagctcttaatttatgagctattttatttacttagcttaaggaaaaaagttcaacactcagatggtacattctttgatattattttattgagtctaaaatgtgcttatttatcgaacggcacatggcccttaacaaaaatgtgtgtcatataaacattgaatccaaaataacaggattgtgtgggagaaaaaaaagtaaccagagcccccatgacacaagccaggcaatgaggaagcatagtggtcagagagaaaaagtagaccaaacaggatgcatcatgggagttcagcaagtgtcatagccagggtatcatttgagctgggcattgaagggtggtattcttttgcatacatgtttgtggtgtgcatgtatgtgtatatgtgcatttgtggggtgtacgtctgtgtgcaggtatgcatgcatgtagagggcatagattcatgggcagcattttctctcataatgctctaccttatatttggaggcagggcctctcatttgtgcctggtgcccttcaattcaatcattttagtcaaccatcttgtttcggggggggtccctgtctctgccgacagagtgctgggatcacagatgagccgccatatgcacacatccacacagatactagggcttctcctgcttgtgtggctgagccctctccccagtcagagtggtagtccaggcccaagtctccctgagcagaggagaagtggccagtcatgggccaagcacacacagcactgtctagggcagcgaggacagaatgagtcgtctgttacctttactgctggtcataaaggagcagtctactcatatagaacagaagtggctttcccactcgggttcattgccattctccctatttcagttttccccccacttagccataaaccagagagttggtccactctgtgaagacctggattattttctgtcatgatattttattttaaattgaggacaagactctgtttatatgtgaggggcacagactccatctgtggaggcggtggagtcccttccgtggatcttttgtccttaaacaatgttcagctgtctcgcgtgtcgggtctggctaactgaactctggaaaagatggaggaaagtggacagctcttcgacacgggttggagataggagctgaagttaccaagatcaagtcattgcccataaccccaggggtgattcatggtgatgtcggccagcacgccacactaaagagtcctcacacctgggagctgagtgtctggctctgtgtaaggggcagtgtacactagctgtaggagctcaacctttaaatccctttaaaattcagagcaaagaaggctgtgttgctgaactaaaacataaaaacaaacacaaacaaacaaaaatcccaaagtcttctgcgcaccctgtggtacaaggtagggttttaattaatgcaagtttctaaatgtggattaaccctttggcgagtccgtttcccaaagcactggacgatactccggtccttttcaaggcagcacagcacaccgctgctgttattctgagtatcaactgaacaccatgctaactcaggacacaaaacaagatttaaaatgattactctgtcagcgcttacatctaaataagtcaccggaggttcaaatgtacagacaaaacatggtaaatcggtcttttggggaagagcatagcttcttctctcaggctttttgaaaagtgattttgttactttaggactaaagaagccttggtcaccggttggctgtattcttgaggacaagtctgatcttaggacagccatcaagggtgttttcctcgggagaggaacaggaagtacatatctggtaggatttgtctcttctctttactttatatttctatctcaatgtctgtctgtgttttgaaattcaaagaactatctgaatttgaccaagtgaaatattaccacggttcaagacaacaccccaagtggaaagaagcaactgccagaagtcacaacttatttcacaaccatcaactgtttatctcaaccatctgcttttatcttccaaatctagtttggtgatagatagataaaaaaaaattcccatttcccctacaagaaccatatgaagtatggtcttcctagccaactctggtgattttcagttttgttctgttttcttaaatggttgctgtattattttgagtgatacctctttgtttgaaaagactaaaaacaacgagctacttccacatctaattataacgagataaatggcactgtgaggggatattaaaaatttaaagtcctcttcgctaagtgtatttgtcagctgagcacactgaatcttgcacagggcacacacacttacgctgtcatgccacgaatgatggtgctgctatattctccgtgctctttggcatgacgcttaattgtattgtgccaaactggcaggatcgtgcaatatgttagtgtaaaggccccacagtttaagggggaaatgtagaagtgttaactctacactgtctaattatacgacctgcctgtcccagaatgcctttcagaaaccgtctctgacatatgggaaaagggtagaacagctggtcattacgggttcctcaagactatttagcaacacacttgaatgtaattaaagggagacactaaacagcacttgtggcacaatgtatttttaatttctatggcatgtggtggaagcaaatagaagggagcattcaagtttctccactcggcatccaactcgacaaagatgctccatgtgcttggctgcctgcaagcagactcccagagccagcagcaggcaggcacccacgtacgatgtaaagaggctgcattgtggcagtgctcggagcaaatgtccaactggaattcccgggcggagatgaagtgaaagattcattcattcattcattcattcattcattcattcaggtgtgcacacatccatccatcagacccaagtgtcacttgcgaggagataaaggcctcctctgccctggcgtagctcacagcttactaactcactgaaggctgtaacaggagtggcaagaaagagcaccaagtcctcggggaggggtgggaggcagcgggcggcgtcccttgttgggaatcgggagtaagtaggtttggtgtgacggcaaaggcaaaagagcaatccacgcagaaggatgccaaagcggagatgggcaaaggaaagagagccctggtgagaatataggcttaacatgtattgaacactcagaacattctggcatggggtgtcttgttttttgagacagcatttctctgtgtgacagccttggctctcctggaactcactctgtagaccaggctggccttgaactcacagaggtcagcatgtctctgcctcccaagtgctgtgtggaatgctgaactattgacacacacaagagcatggaggcgtctcagaggcaccatgcagtgtgcaagaggtctcctggttgccataggtagggctagggtgaggggtcttttgactactacaccccagggaatgttttggtgtgagacaattgctgtctgtgcatcctcattgtggtctcagctataatagcgtttttctttgttaagactcagaactcacagaattcttactttcctcctttttttcttgcagtactggggtttgaacggagaccctttgtgcatgttaggttaagcactctatccgaagtttccagctttaactactctgggagtggtggtacacacctttaatcccagcactcagtgcaggtggatctccatgagtttgagctcagcctggtctacatagtaagtaagtctcaaaaaaaattaattcattcataaaaggttaattactgaaaataaaagaggtaagaaaaccaagagatgggtactttagtttgggttctcaaacaaagaaacaaacaagcaataaagaatatcgtgaactagataagcaagcacaggctagaagtctaatttagaggcgaacacccaggtgcttctcggtgagattgtcaccatgtcagtctcagaatgaacacaggtgtcgcaagtacagaaatgtggccagggagaaaagggagaatagccagcaccgaggcttcatgggtgtgtctcactgtggacttcttcaggtcaggtgtatagactggagaatacctggagacagccttggggttgagtttctcaccagagggaggcaaagcctcttcctttcagtgggtggggccctggaacacaagccctgagctctccacatcccttggagcagcagaaaggtccaggtccttgagatggatgatgctgggaagacgttgtagattgcagttgctggtgagtcagatgagctgagccaggtgtcaggaccttcaacagcgtctgcccatgcacacggccttgcggtaaggtgggggaaatgtaaccatgaaaagaaagaattgcactcaataccgaaaacccctgccattaaagaaaaagcttaaaaatacgctctagtctcactctagacctgccagactatgtatccccatgaagttctcccatcagccctatgaggtaaatgttaaatactcccattttacagtaaggaaactgaggcgcgtgaagtaggcaccgaagaaagaacacatacaaagctagagagccataagaccaagtgcggcccatgtggtagctcatggctctccccatgcagggctaatgccctctcggagtcatggggtcaaacggaagtcatgtgatcatcatagacgaccagagagatcaggaactgtggctaaaagtgacatccaaaaggcccccaggccacaggtgagtgtttgggagtacttggggctcttcccagccaccactgagaacttcatgaccccaatcatgtcaggggataccacttatagaaaaaaaaaatagaaggaatttaaagcaacctgttttactctttacataaacgtgggagaaaatgttgaaactttggcaactctgaaaataaagaaaaagaaaacaccacttcagggtaacaaggatctcacctctgcacctctactgtgctctccttcgagtaagtgaccaagctggtaccaggctgtaaccaccgttcctgtcccagagcctcctggccacctctgggaattcaaactgcagttttcttcactgctgcttaatggagagtccttggccctggaagatggcatcactgactcaaagtcttgttttctttaacaggaagagcaggcctggaaaatgagacattcacagttctgtgcccccccctcctcccaagccctgccaatgcccctgctatcatcagagtagctgggcaggcatagaggatatagacttttggccaaagaacagaagaacacataactaacccacgtgggccttgaccccctgacctctttagcattgttttctccccacctcggctaatggacagcccaattatgaacactgattcaaagagggaagtcacctcttcacctggggtcaagaaaagcccagacgtctgggttttaagagcatgttgctgtggtgagagcatcaggacgtgcatatccacaggagttttccaagacactgcccttcctttccatggctcacttgaaccatagtgggtgtggctcctggcctccaggacaatggaggtgctggggtacacaggtgttccttctcccaccgatgtctggtcagggccgtattgggtctttggcagctgtgaccccatccctggcaccctctttggatccagttcacaccactggtcttgacggggatggggggatgaggggattctgcttaggattaagacacaccttagactggagaagctaaggctgtgtcatttccatactgggcttcacaaggaaaattctgcccttaaagtggttcttaaactttgaacaccatctccagggtcctgaaaaggggccttgtgtttctgtatacctccttgtgtgtgtgacttaggtccttagcttctgtcactatggtaagatgctctggcagaagcaacttgaaggagaagaggtttactctggttcacagttcatgggcacagtccaccatggcagggacatcaaggcagcaggaagcagcttgtggtattgcctctgtaaacaggaagcagaaaacaacacattcattcatgcatgctgctcacatccctttctttacctgtatagcccaggtgcctgtccagggaatggtgctacccacagtgagtgggtctttctgcctcaactaatgcaattaatataatctcctacagccttcatacaaaggggaggagcttatttgatgtactatgctttgttgatacccatgggaggcctacccttttctgaacagaaatggaggaaagaggattggggggaagcagagaggaggtgggagggggaggaatgggaagaaaagagggagggaaacttcaggagggatggaaaacaaatgaataaatttaattaataacacatatatttataatctcctacaggcatgcccagaaatccatcttccaggtgagtctagattctatcaagttgacaaaactacccattgtaggtgtttagaatgtacgtatgtgtactcacatataattagtgttttcacagattagggttgtttcagtaaggtcttgagatgtagtgacaggatcagtcaggacatgatgctaataaaaccaaagatggcgattcaattcctggaccaattgcagggctcttctctagccatggtccatagtattggttgaagtcaacacatgggatgattggtacagtgatgacaaggagaagtggagtttggacagttcatcgaagagacatgctcagtgtgcatgggggggggggcgacaagcctgatagcaacagtgatggggaatgttctgtgtatgtttatcttattgattgttaaataaaatactgtttggccaatggcaagcaaggactaggagtcaaagaggattctgggaaatgtagtagagaagtgatgatccaggcaggaagtgacatggcaaggagactcatatctaagcgaggaaacaggaagtatgtctcttttcccctccgctcctgctccagtggcacaatgtgatccactggcaaggagggacgccaataaggtgtccgataagataagtcttataaaatatatagacttatgaaaattaagactgagctaacagatgagaatcctagttattggccaagcagctttgaacctaatacaagtttctgtgtattcatttgggcctaactggggcgggcggctggcgtaaagctcacacgtggtggtggggctcaggcggcttttggtggaaagatttgtcgtaacagaatggtgtcagaagtgggatgactcaatgccacaaagttcccagagaaaggttcagctcacattggtctcattttcgaagggcagcatttgctattaaaggaaggaagagaccattgtaggagactagatttggcccctccaagtcacctacatttctggctgtggagcagctgcattttagagtgcccctgtggaacctaagatcttagtggctcatccaccttcctgtaaagtctgctcttcccagcataagacaatacagagcttccctctccttctacaaacaagatcgaaaacatcacacatgcccctgcatcccgcttccaggaatggggacaatagctcagctctgctgcttgacaccggttacatccagtgtgagcagtttaggctaacaaaatatgaacaccccattgtttatatccagtccccctagagtcagagtcaacagacttacacgcaaacctgggcctcttcttgagagttaacacagaacaggtcatcctcaggccctgtctatgtaggtggagtagagaggccacagaccccacgttaccacctctagatcttagagaacacaaggaattggccttcacggttgtaagtcacggggactttgggatgttcctttccagagtctacctggcttgcacagccaggaagaaagtattaagcatcttggatatttacatagacacccgggtcctggaacctgggtgctcactaagatgaaagagtagtgcagtccccttagcttccatttttcttttcacagttccatttgcccatggccaactaaggcctgaaaaatgttaacttccagaagtaaataatcctgctttaagttgcatgctgaatagcatgatccaatcgctttctacctggctcactcccaactaggatgtgaacacttcctttgcccacagtgtccacagtgtattggctatcttctccttaatcatctggtggacattttggctatcagagaatgtgaagatatcagaaaacatgagctcatgtcaccattatcttacttaacattgtccccgatgtgtaagagtaagcatgctggcaacttgggtacacagaagagaagccacaaagtacgttctttgtgtaaatggggtagatgtatttgccactaagactagaaaaaaatcataaactgtagttgttgacatctgtgtaagaaagggtctgccatctgtgaaactgatgggaaaaagaactctgctagttttgagtaacaacaaaaatacagacacgatacggcatagggtcttagccagggatggataacacactaaatccatgtttgcatgtttaggaaaatgcttactgcatgtaggatttcatactgtgcattttcaggcatccactccgggtctcagaatatcctccctgtagacagagcaagcctgctatattgactacataacttggtgcttctccgtttactttctctcttggttgccaagttaacaatgcatactatgaggagccacatgagtttcaatgccatttgctcttatttccaaggagagaattgtgtgtgaaatcccatggcaacccgagactgaagatgttctataataaatccactcccacagtagagctgggagggaccaaattctacagcaaccctgaagagtcctaagccacaggtgggccaaggacttgggcagaaattagctgaaggaccagggttgaggcttactagggaggatggaaagatagctcttgccttacaagcatgaggacctgagaacctagatcctagggacctgggtctctagaacacacattgtaacctcagcaatgataagatgggaggtggacataggtggatctctagaggtcactcaccatctagaatggcctacagggtgaagtttctggccaattaaggaccctgtctcaaacaaaaatggtggaaaacactaatgaactatacccaaggttgtcttctgacctctgaacacatgcacacatagttcatatgtgtacctacacacaggcatgcacacacatatttgtacacacatacacgggggggggggtcgagaagagagagaaagagaaagagacagagattgacttcagtagtataagacaggaatcttcactaaaactcccattgagattttaccagaagagccagcgttcatccagcatttcagtgagtggtatgtgagctgccgtggacccctgaaaaaatgttggaatcctggctgcagtcatgagacagggaatgagacaggacccagctctcaggcccagggcacatcttagaagtgaagcttgtcaatgactctgctttctaccccttggtatgaggaagtccaagtgccagaggaatgtgacgcagctctttagactgcccatggtaagcccaaggtttgttctgagcttagctcagtgagggctgtctttacaagggtggtcaaggacttttgtcatgatgccagtaggctgggatctaagctcaatgaagcacatcttggttagaccacctagcaaagagtggaatgccattttctagagtgaactccttcaaagtagcaacgataattcatgatctcgcgcaaatattgacaagtttctcaaagttttaggttgggggatagagtgctgagcgtgagtttcagcatatctttagctccttgcatacataggggtgatgccgctacttcaggttattctggttagggaagtaccactctcaaatatcttcatcagccagtgttcagagcaagtgttcagcatgaatacagaaattgggattttcgctaaggagtcactatttttagtgtaagaggtgaatacaagccacgtcaaagccttactaagcagtgggtactagaagagaggtagatatcgggagaaagtcagaaaagcccccacatgcatgcacacccacacagacaatcaattccatgtaagattggctagagctacaagaaggtctatatgacaaaaaataaaataaaataaagataccccaagcaatgtgtgcaaaataaagtgtgctaggcaagaaggctcagccaggtgccagaagacacccatcagagcagatgggctgtcaagaatgtagcaagccccgcaggtagagtgccccaaactagatatgggcagaaaacttaaatcacgtgacagtttacaaggatgctagaatgatatcagaaaggaagcagctgtaaccagtactggtgtcttagttgagagatcaaccttgagtaacttagcgttcacagaggagactggtgtaacaagaggttctttgtccctgcagggtcccactgcccttgagagccccaaataaacacaggagagttatattaattatgaaactgctggccagtggcttgggcttcttattggttagttatgtcttaattattaacccatttctattaatctatgtatttccacatggtcttggcttagcagagcacaccttgcgtgggctctacatgatgactctgtctgccccttcagactggtctttgactaaccttccaggactgctgtgatatgaatctgcaacatctcccaaagccacacgagttaacattttggctcgaagcttggcactattggaggtgttagagcctggaggcggggcctagcaatagattgtctagtattggggagtattaaggcagagactcagcagagctagggagagagagaggagcctgctctgtagagctggaccagtgtgggaatgctggggtgcaaagcccagtttttctcacaacaccaccctgctgccatgagtgtgatcactaacgagctccttggagctttaccttctccccatgctcagcttgtatccaacgactatttgatacctctgcaccctgcctcagtttagagttactgataaggtacatcctattccagggcatctcatgtgtggcctcctgccacagctgctggcatcaccactattccgaatcaccttccttccattgcaggtgtggcctctaaaagcagtatcccaagaagacgctcaaatctatctccatctctgagatgattttcttgggaacttgacgccagggcattggtgtcaagagcagtctaaggaatgacgttttaaggctgaaagttgggcatctactggtcagctggcaacgacaaacccaatgaggtgataaatgttatccgagaagcccagggtgctctagtggtctaactgctaagatgttcgctgatggtgagtaggggagtggaagccctggggaacatggacattgtcgagtggtggatcgggaccgttgctcctcagtacttcagctgcacgaaggagagttgctgagagcctgcggtggactaaatcatcagttttaggaagagtgcccaaagacctgcctgggaaaaattttttttaaagtttcatcccttgcatccaaagaccagaacaatctaagaaccgggccccatcattgagtctaaaggttgaggatttcagagaaggttggtccatcctagtaagtcctctgtacaggcagcagaggtctggtttaaaaggacttgggtactgagccataaaatagacacacactgcacttgttgacaacagcacagaccctgacgtgggtgtcctgggagccacccctttctcttatatggctagcagaccacaatctagtcaggttccaatctagcccagcagtgtccactgaggaactggtgaccaggactgtgaggggtgaaggaacttcaggatatagcccgtggcactaacaggaaccactgcatagaatttgtatagaatttgattccaggcacataagagaggggggtacgcactgttcagtgatgaaggacctggtgccctggtggggacagagacatagagataacctctggctggaaggctctcagaggcttagacctgacccacactaagtgatgtgatgatactcagacactgtggcattgacacacaattgaattaagcagccctgagctgtgtgtgtgttacaatggctgtgccaggtataataagtcctgggacacaccaccagagcccacttcaagaatgcatttgctcccccagctgtctggcatcctgccagctgacaaagctcagccagctgttctctgtggagactgtccttggccagacagaggtgccttccccttggccctatccccttcctggagtacacaccaagtaggaaaatgaaggttgccggaaaccaggtagaccctttaaaggttttatttgggggatgaagagatggctcaatgatcagaggtgtgtagtgtgcatacaaaggacaccagacctggtcttcacagccaaaccaagcagttcatgactacctgtgactccagcttcaggaatgccacaacttcttctggcttctttgagctcctatatacaccacacacacacacacatacacacacaaacacacacacacacaccctacatacacgtggtcacacacatgcacacaaacccctacaatcacacacaaacctacacacacccctacacacacacacacacacacaccttcaaaagatcttatttcagtatctgtgaaattatgcatatgctctagatttctgtgttcttttccctaaataattctctgcagagctttgttgtttctctatcctgtggcctcaggggtcaattaaattggccatcgcatcttcttataaaaagccattccctagaagagagttgccaggatataagcctttccccttgaacaggaagtactgagtggattcagagctggtgttctaagctcaggcaagcattctctcttcccagggtgaaggctgtttacacactgcccaagaagtaagaaaacatcttttttgtgctgcttggcttgtccttgaagacatctgtgtctcactccccagcctgctcaaaggcaccatatgaaatgaggctgacttctctgttccctttattcaccacagggcagagtcagccagcaccgtctctccaggtaaagattcaaggaaacatggaggacagctgttctctgcagcaggcaggcacgcttaccaggttctctgtgagcactggccctccatcattaggccaagctgaattagggattcagcctggaaatgtataaatactggatacttgtgttgagtccttgggatgctccaagataaaagtagccctgtatctttgtctcatttcctgaagtgataatacaccctgtcaaaagtaacacacagtttcgggtatagtccatcattgtgggaaaatcaaggaaggaacttgaagcagctaatctccttacatccacagtcaggagcagaaagcaatgtgtgtgtttgctggtgcttagctaacttcctccattcttatacaatccatgttcccctgcctagggaatggtgacacccagagtctgcccactgatcgagacaatctcccatagatgtgctcacaggccaacctaatctaaataattcttcattaagactcacttttcaaatcatgctggggatgcagctgacaattgtcaccagccaccacgtcctgaaatttccagggcagtcctgtgatgctcacaccaagcaaccacagctaacttttggcagggagtttcaggattcttttgagggagtgttcctctgtaaaagcaaactcaggctcaagcacacactcacattggttcttccaggctcagaagcagcagccacactgagtgcaggacattctagatttttcacctcagcagccatgcccactgggtggcttctctcgcaaggtgggtactggcactaagcagactgctgaaggcctcttcttggtgatcatactgggttggttgttacggcaatgcacaatttctcccagctactgaactcatgcagatccgggcaaggtctcttcacttctgtcttttcttcctctgccgcagcaagcagagtctcctgagacggaggacatttgttttctcagcccactaactccaactacagtacatttccttcttatcatcgttatttagtctgtaattattccagtctactaactccagcagaggttggggacagccgtgtctacagtgcataaatcactgactttgggcccttcattgtcattaataagctcaggacatggaagtccccatggatcagctccctcaaatgcatgtacattgattttataacccagcgaggaaaagggaggctaggctgcgggcaaggacttttgccatgaagatcagaagttccatttaaacccatggtgattgcagcttggatttctttgcttgtcctcacagggctcatagcatgctaatttggctaagttgtattaagaccaccatctataatgcttgaagaaatgaaactctaatagggcacaatcacacccatttccaggactcaccgtgtactctttataccgatgcttatctctgttggaagttacagggaatccacctgcaaggcagattctggaaccatgccatccccaaacacttggctttttcttcacattgaagggactatctttcattgaccactgaacagcaattgccaatggcacatatcggggagggggcagtaggatgcagtagctggcagagcacattgacactgccaccacactatgtccaattttatgtgtatatgccccgaagagtcactgaactgcagaacactggtccccaccctcagggagtcaaggcagaaagttgcaacaaagccctggccatgcagaaaacgagacaagagctgtgtgattaccataacactcaaactatccgctcagcagaaaagtctgcgtttctccttggtgacataagaaaccctgtgacgtggaaagcaggctgttttgggtgaggactctggcatggagaccctctgcaggctggactgtgacttagttttgagttggcaacccatattaggggaaggcagcctacagtgtccctgccgggcttcatgaaagtcatttacatgagctctttagaagtgcccctctctcaccagcccttggggatgtcacagatggcaaagagggaaggtccctgaaccccaacatctggtcaaatggttccacataaggaaggagaattaaatctcttacaggagtctgttaaacacccatcctaggtcttccagtcccttttctttgggaacaattatcttgacattttagacagatctggaaaatattcaatatctaagaatagccggctcagggtcacacgctaaacacggatagctccatatttgaagctactgagtaagaagagagaccaggggagaagacgaaaggaaattcaacagggggaaagggagacgacaaaacagccgagtcactgtttcattttatcccccatttcacatcctgcctaaatgaagatttttttaattcattgggtctactggtagaaaccagttaaaaaagaaaaaggctcccatcagagcctcagataaatggcaaagctaatagaggcccagggacagccttgtcagagccgcacagcttgcagctccacatatagtatcttgaaaaatctttactgccttcaaagatacagcccttggcactcagcaccatgcctccaagtttagaatgtggacctccatatttatgttccccagatggtgggatttataaacgcaccatggggtgctattgaaattaataatttaattcatttcagtgatggcaccgtgattgctagtcattacggcagtagcagttagtgcagcctcttggtcctgggatgtagctgaagggtaatatcagctagagtaattctctgtcatctgatttcaaatgccgtcaatccctcctgaatggggagtcgccaaaagtttttggaaggaaaatgaagccggcatccacattagttagatgaaggtggcttcgatttatgtgatttcaaaagtttaaaatccgttctccgaggaatggcggaatgatatggggttgttttgcctggagagggaaaagataagaaaggagctccgatgccagcatccacaagagcacctctctcttcactgtctctggagattctacatccaaataatggagaactaaccacactgctcactcctatccccacttgtctgctcaccaagggaatatcctggcagttgggctaaatgacttctaagtcccttccaagagatgctcagagattcctggagtctgggttgtgtgagtgggggagggagggtagtgactaaacctcctcaagggaagtgcgtgtttctctcagcctaatgacctgaagcctaaatgtgcaagagggaagatgactgggcaacaggcacacacaagcacagccaatacaaaggaaccctctagaagccctccccaggaggctgtaactgccttagatttatacagctctatttcttccctgggaagtctggaccgttttccataattccatcataatcctcgaacttttccttaatcacagaaggcaggcaggcctggaatacagactcccactcgatagctgaagaagccttactgagtgaatgagtctaaagggggctgaaagtggttctgttctacctagctttttgtttcatgtgtcgggatcccccggggggggggggaggctgtaccacatctgcctaacccccagggtctaagtgagagcatgagcaatcagaaagatgatttactgaaatgttagggatactgtttgtgtgccccccacccacccagatttgttgacatcacctcatggcagaggacagtgatggaagcatgaaactgacaagtgacggtgaaggacagggggccaaagagactatgtgaagccagatttggggtttcatggcaactgtctttgcagactactccaggccctgtgagaagcactttcaactcctctgaaggcagttcccccagaaccctgaaggcagttcccccagaaccctgaagacccctccatgcaacacttctcagatgtcctactatctcccacaccgacacacatgtagaggacagacagtccccaaacaggcagaaccacagcagaagctaggaacagagtggccatgttaaaattggtgaggactcaagattgaagagtgaaaaaatacaagttaactggaatgcaagaaaagggctgctgcatcagagctggggccaagaacgtccatcattcaagaaaagggaaggttaccgatgaaaatttcgaagctggagagcctaccactgcccacatgggcccagagcagtagcctttccctaggagtctaggatgccaatgtcttggggtcaaggtcaaggttcagtgctgtgggaatggtctaccagaagggaatggaaggagacgggccgtcccgtggttgtgtcaagcaagagccactgtcacagggagtgggacgagtccccagtcaaagacctcagggtagggccagaaaaagaaaacagcctatctacttgttccaccctagcttcacagaatacctttaagagccagggacttgaggaaaagacaagaacgcaccctgtcctgttttagggattacaacagatacctttcatggactcagtgcagacagctgagcacgtgtgccttggccattgttataagtgacagaggtgaacattgcataccagttactcagaactctccctgggtcaggggtcagttacctcatttcctgctctgcagacatctggtaccagttctgtgtgcttctcactccctgcactccattgaagccctcaggctatgtgcctgactcaaccctggtagccgaaggaaatgcttagtaagcaagttaactgaattgtctcacctgatgttcagaagtagtgtcaagagctgatactctggaggctgaaacaggaaggtctcaccttccaggtcagcctgcttaggctataaagtgaaagcctatctccaaaacaaaggaaggctgttggggagatgacctagttgataaaatacttgccgtgcaaacatgaaggcccatatttggatcctcagcacatgcaaaacaaaacagacagaaaacagccattgattggcagtgtgtacctacaatactagtgctagggagacagagacaggaggattcctggggcttgctgaccagctagtccaaggggatgagtgagcctcaggttcagtgagagaccttgccttgaaaaagtaaggtggacagctctgggctcaatacacatgggtgtttatacatccatgaacacacacacacacacacacacacacacacacacacacacacacacacacacacacgagatatgtctctctgggggtgggtagggtacttggagacaaacactaactgttctttctttctttccatctctcacatcagccattgctgtcagggacacttttcagatcagtgcccacccttgagggtacccaagtggccagcactgtggaagacagagtctaggactggagtctgggagtcagaccctaatttccgtactttacagtctcagaatagaatgcatagctgcctctggtctcagatgcctccttacagtggcttagagaaaggaaagtggatttttacagtagaatagagggtgtttaaacaccagatccaacttttgcaaagtaaagaccctaggcaaggtatttaactctcctgcccctgatttttcaactctaatatgagggcaaaacaacctatcacagagaactgaggctagccctcagttggttcaaatacctcgcttctcagaacacctggctcagagaagccaaccaaacacaggtctgttactttcctatagaagaacctttgtgtagggctatttgaaggatccaaagaaggaacaaccgacagaactctgaaaactgtagggagatggctcagcagttaaagcatttgctacccaaacctgaggacccaagttcagacccccacgaccacagaaaataagtgccaggtgggagtggcagccacttgtaatcagcctcagaaggtagagcctggggcccccccacagaggacggattagtagactgaccaattgacgagctctgggtttgattgtgagaccctgcctcaatgaataaaatggagagcagaagaatggttttcaacatcaatctctggccttcatctccacgcacacacatacataaatagaaacacacaggcacgcatgtgcgtgcattcacacgcacatacacacaggcacacacgcatgcacacacatatataaatagaaacacatatgcacacaaacagaaacagaaacaggcacacatgttcatgtgaacacatgtatacacatgtacacacactcacacacatgcacgcatacacacatacataaatagaaacacacaagatgggcggagcttccaggatgacagtgaggtgacagagtggctctgatttgtaactgtgctctggttcaggagaagagttgaactttggaacccaaatgaaatggaaacaaggacactggtctggttaccactgtggtctcattctggtggcagatgctcgctgtgactgtgaagatggaagctggctggttctttcttgtggcctcctgctgagcatgccaggcacaggaaagaatcctggatgtgcattccttcccagctgtgcctcctgggctgcctttccacacaggcttcgtggggctccagggacaaacacatttatgaaaatctctgcttcttcctcagtcactggccagttatggagggaaggcctcagaaatcatccacacgggagaatatttgtacaacccagaatttctaaacttaattagacagtaagacctccccgttacccgaacacacagttaatagcagctagaacaaggatgtgtagaatcaggagtctaggaaaagattggcccacccacccttgtccctgccaggttgtccgagactacagtggactcacatcagaacaagcttggtgggaagcagccgcatcacagcctccctcattgtggtggacccaggatgctgctctggggggaggcggagatcatttgtgtccttttgatacacagaacatgtaccacccgacgcatgcccctgaagagagtccagcctgaagagatctgtgctgccccacacatgggcagtgagcagggagaaaacgggtgctgtctttatctgggatggcacagcaagtgccctaaaagttgacccacaccccttcttccttccttccttccttccttccttccttccttccttccttccttccttctcagaccattccagatcaaaacagttggtaagtgtgccaccgagagagctggcatctgcaaggtgggtagacttttctgaattcacttctctgagcatggctctggctcacagagtaagcataaacggcgccgtagagatcacaccggctgacagggcacaggccttgcatcctttccagccccctgcacacacacacacacacacacacacacacacacacacacacacacacacacacacacgcacacacatgcttattcttctatttatttcctccaccattcatattcattggcatcgcccttccctcccagcgatcatccatcccattgtcttctcgccacaccattcaatccaagacaatcgcgtcttatccactgtgtgccaggcaccgagcttagagtcatctgttctcggagtcatcttggagcggagtcatcttggattctgccctctcgtgcacagcatctaactgaacacaaagccctctccactctgcctgcgaaatagcacctaaatatcacccatctcttccctgattgcccttcttgttgtttctcatccagagaactgtggcagccttaagtctgccagcctccagcactgattcagatccaaaccaggacacacacacacacacacacacacacacacacacacacacactcacacacacacacacacacacacacacacacacacacacaggtttgatcacaaaccagtaatgcaaaatccttcatccttgggtaccatctacatacaggtcagagccccagcatcacacagcagaaggaagggccccatgtgcgtctgacatccttcctaatctttcgtttctaggatccttgccttctccttcctcaacaacaaggctggctctagcttactatggtaacacagatctgtcacagaacaagagtccaccatggacattaaacatgtgcagagagagatacacggaccagtagatggaaaaggagaggcataagattggtcaccccagtgggcacttttgccttccattgggggccaggcaaatggccaaacacaaactcagaatagaaaatgagaaaattccagaagttttacattgtatcctaccctgagtagctatgaagagtagcatggtggcatctgaggctgtcagtcatcctttgtcctatgtagtcactctatgtgtgtctctttagtcactcaagtatctggctcagccgtcagatcaactgctgctgtatcacaattctttcaggctactaactcttcttttacttaatcatgatcccaaagtacaaattcaatgacactgggcattcagttatcacaaggggaagccataaggaaaaaaaatcttatgcttggggttgctaagaccattgcgttatcgttgtcaatccttttaaactatgactgctttgtgagctgagagttatatatttatagcaatgtagggggatagtgtatctgtcgggtttggctttacatggatttcacacatccattgaggggctcagaatatgtgctagattcagctcaggagggacagcttagctttctaatggcagttgtggtgaattgtcacaaaccatacagtaaagtcattgtgattaaccttgcaagtttgaaacccatcagcagaactggggtgcttcggggaactcggtggagggaatctgcttctcagggatcctgcattcccattcccctccatctctgtcacgccaaccacagccccatcaccgcactgacctcccgaatctctctcctaaggactcttgcaatgacttatttgggtccctctgtatcatccaggaggtccttcccacctcataatcttctatcacacatgtaaagtccccattgccatgcaagatacatgtgcacatgggtggacactgggatgtgacgtctttgggcagacatgatataactttctactgtgaatgaatacatcactttacatgagcaaaggacaagtatcctaaaagtaaaaataccagatgagatgagctcaaactctgtctagaaaagcaaggggaagcttcacaatggagcaatgctgggtggagagagggggggctcttcaggaattctaaggggagagaagggatgagggaacactacctttcggagtggagggtggagcatcactgacttaaaagagatggagtgacaaggagacaggcatgactgaggcatgaggtcctaggtgaagtagggtaggcgtgccaagctgatgactggagtttcatctgacttctgtgggagaaagcacaggagcagcatggatgtgacatggtcgtgctctgaacaacactgtccactaaatgtcctgtgatgatggacatgtcttttctctagtgttccatgggagagactactggccttgtgggcaattagttacaatgggctgagtgaatgagaatcagaactctctctctctctctctctctctctctctctctctctgtgtgtgtgtgtgtgtgtgtgtgtgtgtgtgtgtgtgcatgcatgtgatatgcatgaatgtgggttcacacttgctatgacacacaggtgtcggccctcaccttccactttgttaagcccaggctctctcttttgtttctcaccactgcatacaccacactagctagccctggagtttctggatcctcctgcctctgcctcccatttccctgtaggagcactggggttacagatacgcaaaactaagcctgggtctttatgtgggctctggggatttgaacacaagtcatcatgtcatgcacagcaggcactttccccactgagtcacctcctcagcttctgagaaactaccctttaatgaacttaaatttccctatgaatcttgagtggtggaaagctcaggagaagcttgggcagtctcacttaaggaagaacatctataatggacgtgatggagatgaggcaaggaccctgagggcatcagtctagatgaactaatgtcatgaatctgaacaaacacatgggcagacttagcaatggacaggttagcaagagaagttaaagtcggtgtcatgagaacagtgtgagtgatttagtcagggttgattgacactggggcaagtgtcagtttctcacctggatggcagaatgatgctgtccatcaaacagaaggttcagagcttaacaacatcattttgacttattttgaggtaaaatggacccattccaaggtgcacacagaacccaggagaagggtgacagaagctggtgaaagtcctcagaacccaggtggtagctgagttcacggggggcatgataagacttcctgaacaagtagcacagagaagcagatggggtcaaagatgacaccagcgcgatggctgggaaggacagagtacaaggcaccaagaaaagtggagggtgtacagtcccagggagaagccaacccaggagacaagccagtctctcctaggggtgtcaaatgtggcagcaatcagtgacagctgagtggccataaacccaagatggaatcttggcaaaacacattttgcagaatggggttagtgagtggagcagaggccatggatcctcgggctggtaaggctgtggaagggccggtccagcaggtaggtctcttcctggggctgagcgagatggagagtgtcaacaacccagatccccctcctagctacctgagggaaccacaatgagttgggagacttgtcaaagcaggatctctcttcattgcatcaggaggtacttatatagggacaaggaagtgggtggggacctgaggatggggtgaggtgtaacggccaataatacctcaccatgttagtagtagctgggcggaggcagttttgctgagtcactcttaggcagaagtgataggccaaaaacaggtcaccaaattctagccaggctcaggaagttccactaggtcttgcgtccaggcctttttaggcccaacacatgggtccttggtacatgtgtggaagaacttggatgatgctgggccctgagggttaactcttgtctccatgaggctgggggttgagggccaaagaaaagatgagcataggctatgcgagcacacagctaagacaggtggggggcacattcactgagggacaggagcctggaccacagggacctgaacacaagacacagtgggaagatgtggagaaggtgctttggtttcctataagataaaaacaaagtgaacatatataaaggtctaattcttttaagtcgcatttgaaaaattattgtattgcacagcagttgagtctaatgcaagctataagcttctgcaaagattgttatcaatacgttctccatccaggccatttggtgtgtgcagatttgattgaagtgtgtctggaacttctgtcagaacttctgacacaccagggctcaactctgggtttctgagaaccagcctctaggctggactgattctgaggtcagggctgattcctgtccaaatagctttgtaggggtcacatggaggaggttaccgaagattaaggcaaagtccattttgccacagcagtctcccaccccattgttccacccctgctcccagcacacacatgcacacacataatcatgcatatatacacacataaccatgcacacacaagcatgcatacataaccacacacacacacatagccacgaaacatacataaccatgcatacacatgtattcacacacacacacacacacacacacacacacacataaccacgcacacgagcacatacacacaaacctataatcattcagacacacacacacaaacatgcaactcacacctcccccatgcatgcacccctacaagttaccccaggcacacatgtgcacacacaaaaagacatacttgtgcattatctctccctcatacacacaacattttcaccgccacataaggacctcagagcatggatcccatttccctcacctcccacctcagctctcacagtcatcactaggcagccagcttagagctgtctcaagaagagtcctcagacagggacagggaaggtcacttggagaggaggcagcaggaggaaacagaagagtgtgggagaaagagctttgcagagatgcacaggggagagggaggggaaaaggtgtcagggagcccaggcacttgctactcatcttgctgcccgagcgtcaggtctaggggagtatcaaacacgcacagttagatgatggcccatgggaagggcctctccatcactttgtaggcccttaggaggggcgaagaggaggaagaggaggggggagtaaagggtggaggaggggaggcagaaagccaacatttcactgttcttcacatatcccacagtgccagcccatgttcccagtcaaatgctggggctggcaatctgttagatatctatgtgactgtccctgaagctttattttctttattggcaccctgagtggtggcagactggccccgattgttaagtcagctccaaagggggaagacagaggaccagcaagtggcaaaggcaatactagtcctatatatatatatatatatatatatatatatatatatatatatatatatatagagagagagagagagagagagagagagagagagaggcggatctctgtgagtttgaggccagcctggtctacaagagctagttccaggatagcctccaaagccacagagaaaccctgtctggaaaaaccaaaaaagaaaaaaaaaaagtttatctgttgttttgtatttccagtggggaatctaataatcccagagatgcctgaagttctcagaggctggaggccaggtccagcttccatctagatcctttctcattgcatcagagggctcccactccttcttggaggtgtcctgggaaaggggttgagtggaaggaatcccaggagagtggggtcttccccacccgttcagctacattcggctctctctctctctctctctctctctctctctctctctctctctctctctctcacgtgtgtgcacgtgcatgcactgcacacacacacacacacacacacacacacacacacacacatctgataatatttcatttgaagaaagtttctattatagaaactgaatttttagcaccattcacttctgctgttcttagattttgtgcacagcaggctctagcctagagacacattgttgagtacagagggctgtttttcaatatgaaaattatttggcaacgataagaggctgcatgagtgatcgacagaggtcgggatgacagtccatggcaggtggacttccctggaaagtgaacgatgctgttctttgccggaggaccttgttaaaccaaaggtttccagatcccacattggagtctctcattcagaaggtgtgggtgaagcccaagagttcacatttttcttttcttttatgtgtgtgtatgtgtatgtatgtgtgtgtatgtgtatttgtgtatgtgtgtgtatgtgtgtttgtgtatgtgtgtgtacatgtgtgtgtattgtgcacgtgtgtgtgtgtgtgtgtgtgtgtgtgtgtgtgtgtaggtcagagggcagtttgtgggagttggttgcctcctaccctgcaggacctgagtccagtcatcaggctttgctgaccacaggcgtctttgcctgctgctctgagtctctctggctcaagaatttccatttctaacgatctccctggtaacgttattgctactggtccaggtccacactctgagaactgcagcatggagtctagactgctgaataggagtgagactctgcatgaggccccagtatccttcgcattagattcctgctgtcaaccaagtaaggctcctctcaagcagtattatccagccagagaacggaacatccaaacatttcaggacctggaaaagcacctataatgctaaacaatagacttggcctcagtgagagaaaggacagtagaagagtgccaggcacttaacggtttctttgccacatcaaacatctgctgcctgacgtctcaatgccctgcagctgtggtggctggcactggggagggacggagtgcctgtgtttacagaggtctcacatccactcatccatttaaaagtcacataaacgtcgggttttgtgggagagcaaactgtgttctccttccttgtacaagtatttgtagatgcccaccatatgccaggcactaggtgaaagacacgtgtttgtcaccttcagccagggaggaaacaggaagtgagataagagctaatggaagtatatggaaaattctgtgaaggaggaatgctttgtgctggtaggtaggaactctgttgtggatgaaagggtttgggtctgttggtgagacatccaggggagaaatcaagaagtgtgcagaaacctaggagccgtagcctgggcctccccagctctcacggctgtgaacaagttctccatgaacagagacagttatgggaggtacaggaggaaggggcagcagggaaggctgaggccaactttggaccaacagcaatgtacataaggtagtgaatgacattaaagacacttggatatttctgtcctaaacaatcctgttttatttatgtgaaacagtctcttctgtgatttagtcaatatgccctgtgggaaagacacaacatgccagattactcgccgagcctagcttatgcttcccggttagaatccagcctcccctggggattttcacgtattgcagtgtcttacagcaaagagaaggttattcttcacaaacagctccaaactctgactcataatgtccccaagcgttttctcctgagaccgttagctttcagtcacttagtaggacattgtatggtggagcgtgtgaagcaggaagccagttcccatcactgagctggtggctaacagagctgatggagtcttcctcacatgcacacacacacacccatgtgcttattcacgcccacaggttcacacacccaatcatgggcacactctggtgcacatgcatgcacagtcacaagcacacgcacacactcacacgcacacacttgcattctcaagcacttgtgtgcgcacggtcacactcacatacctgtggcatcgacactcatgtacacaagcactcacgtgcacacacttgcatccacacaccctcacacactcatgtgagcacacacacattctctgcccgcttctccactgtctttcacctctctttctgcctgcagggtatgattgcaaacacagctgtcacgttctcgtacagtcgcgagtaaaaaccacgctcagcccctcagagaacaccttccctcacaccaacacaccagagtgtggttactcatggggcatggcttagcatgtggtctgccagttcacaccatagtgagatcctgtctcagaacaaactcagtggttgccatgggggtacaggcatcaacaaggatgcatttattttacataaagtatatatcagcgttggaaacaactggcccttgaagcacggctgagagtcaccaacatggatgtctacagtggagatcagtgcgatccaggtgccgttccctgcactgatattcaatgtgcttgctaaatgacaaaagccaaagaagtgggcaagggccctgagattccattccaaggcattctgggaaaggcaaagcacaaaggacaaagtgtgggtcagtcattgtcagggctcaggtggaaggcttgactaaggacgtaccccaaggcattatggggtttaatgaaaccacacttcctgataggccagccttacacaatggcacaggttgtcaggagtgtcgaatcctgcaccccaaagagtgccttttactatacgcaaattaaaactaaattaatatttaatgttgatctctactagatataattttgaaggatgctgttgggaaaacaaaccaacttgtcactttatggccacacaccacacacacacacacacacacatcacttcttttgaaattacctccatgtggctctttatttgcttgtaatcttactcctggggagcttgcttggctttcccaaggcacagtagacagtggctgttaacactttttttctgagctgcctcaatttctacttgctcattgagagaatcctcctgggacagatgcatcacaatgcttttagagccatattcacacccactgtggtgatttcagagtcatattcacacacactgcggtgatttcagtcatattcacacccactgcagtgatttcacagccatattcacacccactgcagtgatttcacagccatattcacacccactgctgtgatttcagagtcagattcacacccactgcagtgatttcacaaccatattcacacccacttcggtgctttcacagccatattcacacccactgctgtgatttcagagtcatattcacacccactgcagtgcttttcacagccatattcacacccactgcagtgatttcacagccatattcacacccactgcagtgatttcacagccatgttcacacccactgcagtgatttcacagccatattcacacccacttcagtgatttcacagccatgttcacacccactgtggtgacttcacagccatattcacacccactgtggtgatttcacagtcatattcacacccactgcagtgatttcacagtcatattcacacccactgcagtgatttcacagtcatattcacacccactatggtgcaagagtgaagagataacatgtactccactatgcagagtgactcagttgctaatgtgtgaccaggcaggtgcttggacagatggcagagacagacagacagacagacagacagacagacagacagacagacagacagagagggagagggagggaggatggcaaatgcctcctagagtccatgggtatggagacatttgctggagtcttccatccctgtttccaagatcaactccaagtctgcacactccgttacctcgcagccgttgctcctgggcagtgagcgcccctgcacacagaacatcatgctgatgtattctcccttgcattgtacgtcacgtatttgctaattcttcactctattctgcatctgaccccaccgatgggggattatggtattaactctctacccagcacacattctttacagcctctcactaaatactgtaagcctgctacagagaggaataaaagtgaaagcatgccgtctggccttaagctgagcacacagagggtcgtgatccaattggaagggaagcagaatttttaaaaagaaagaggtttgaccaaattttaatccatgtcattttcatctccctctccctgtggatttgggtgattttatttacactgtcagcttgagcctagggattggaaatcgggcttttacagagattattaaaagtacctacagtacactaaaggttgggttaactgagagatgcttctaaaaatatgagcatgagtgctctggtctcggacagccccagcgaacatctcagcctcttcagaaggttgctctaagctgggtgtgcagatcccagttgtgggctgttggggtatttctaataggtagcaaatgaccagggatggagctaaattagcattagtcagatgagaaggcagctctttatagcgttaatgccaatgcagaataatcccatgacccttcttcccaaagtgagggtgctgtagggggggtcagagtgagagctcctaggatttccagtgggtgggtggctgcagtgtctgaagagcctccagtccatttagtatcatttggtctaatcctcccaaatgcaccatggaaccctgggatggacaccgtcatgtcgggacttgggacaacaaagctctccacctctgtcacgcctttgaagagcccaacagataaaactgaagtggtttaccacattccaaacatcaggttcacacatgcttcgatgagggccaccgttcccagaagtcctgtctcacagaggagctggtgatgagggacttgcagccttgcagacttacaccctgtgacttagcagtctggccctgtggctcggtggttaagcatcttcttagcaaacacagggcccagagtacggagcaggaaatgggtaactctacaggtttcctgggattttagagggatttgatttgacaatctcgtggatcctaatgagactttcaaatatgggtcccaaagacagcctcgtgcctgatccgaggtctctgtaggggatactagtaggtagagtcactgtcttgtggagactgagatataacccatgtctggaagtgagaggaaggtagacagcgtggaaacatctgcccaagggttcatttcactcaccaccctcaggtctggaggcttggacaagaatatctggttagacaactgaggtccccatctctctgtcacagcctggacctcttggtggagaggtgcagtatctggccgtgtgccagggcctggaggatggagcacactggtcggtgcacacgtgtgtgagtctcagtgccgagcctcttgttctcacacaccccacattctcccttggtcctcatcttcttctctccatcccccatgacttattttaccttgatagccttccccactcacctgcgaaacctaaggcatctggtgccctagagctttaagcgtgactcctgctctgggtgtccaccctggaagtacacagggcacgctcccagcctccccagccttctgcatgtcagcatgccctctcctaaagacaggctctcactgggcgtaccagctcaggtacatctgcctgaggacacaagtccactgccacccgaagtgaaacatgtccttcagggtgatgacgcgcatactgccgtgacgacaggccacagtgctgcgagctgtctgagaagcatagagctgtgtgtccttctgtatcaggtttcatgtgtttttcttattggatttgcccagcaattccatgaatctgatgtaacaaatgtgagttcccactgcagcacagcagcgctcacgaaataaagacaagtggtatgatccagatggcaggagtaactaacccagagcttaactcacctggacagtgcacagtccacagcccgtcctgctgacctagctaacctcttctaaagaccagggtcaagcccacatggcctgaccattctgtatagaaaccaacaattctgactgtttgataaagttagtggtgagttaacaactatgcttttcgcttgtcattttcccgatctccattcccaaatgcctttccccacgctggtttccagtaccttattggcctggaaaatgcctcttcatcctgaaaccactgtcatgttatgtcacctccccaacagaactttacctctctctgcccctccccacatttgaaaggtggatggtggcagatgctcatggtgttgcacttaggatctgagtctctatttcatgacttgcatacatatacagtttatgtatgtgatatctatttcacagtctggattatggacaggccaaccacaacacggatgatagtgacagggtggtaaggatgcctcattcttctgagaggagagctttgagaagcagtctcaatgtgaatgatatgttaaagtcttcaatgccatctattataaaatgcagcttccaaatgcatgtgttaaatcctcatctggggatattacttacacatggacatgtggtttgagctggacagcttgctggatgccttcttataagtgacggctcggtagtggagactccttccatcctgcggctcttccatcttggagccctctgcctccagctgttgaggtaagaggagagtgcacagatgacaaaccatgctcaaggcttttgacctgaaagaggtgagggtcactggctctgctcaccatgcttgtcagagcttgggtgtgtgtggcctggcaagagtgttgttctgcatgacccacagaggttaaaaaactgtgattgcttaaggtttaacaccacaccatgtcctcggtagcccagaagcccatgtcactttcactcatcctctcacagcacatactcatcccaccccagaggcgtggtgtggtgtcaagagtgcccatcaaatcatcgccacaggtaaatatccagaattggggtggcatggcacccagacattaaaaagattcattcgctacctcaactttctcaccatggtaaccattgtaatatggtaggaaaggaatggagaaccacatcacccaaacaatgaacagtaggactcagtcttcggtcccctgtagtacttggaaccctgggggctgacaaagacagccagtgctccctgtggtggtggaaccatgtgggttgaggaagtccctttatcttattttcatcagggcccagttaataggtataggcggtctcctttcctccaatgaagtcacccctaggagcttgactcccactcaagtcagaggggtggggattagaaattgttttaatcctgagacaagaaagctctttggagtctaggcttctggcttcttcaaagcccggtagtcaaaatgtagacagcaggtatccactagctgccagttactggtcagtgtgccagtcaccctgtcctgagctactcttgagattattaacagatgaactctctcatttcctttgtgtttctaccgccatctctctcttgcaaggtgcccaagataaaaagtgagaaggtcacacttatggagtcagctggttttgcccacatagtcattcattctacaaataattttgctgaatatgtgatgcttaaattctttttagtgccctgtcttattgcttgagtccaaaacaaagcttctggagtctctgcatctcattccatgtacacttgaaaggtcaataacgtgtatgtaatttcctaatatgtaataatattactaaaatttgctatctgatctcccccaccatggctacataccaggcagatgaactgactccaaactagtaggaatgatcataacaaatactgaacactataaaatattgattaccattatttcattctttgacagtagtttcctttttgtctgaactacaaaataaatttacatatataagaaaaaggtaacagtctagtgataggattttgattatgtccagaccccacccctggtaccaaattctgaattagagtaaaaaaataccaacagtaatgaaaacaatcttgttgacttcacacaagggtttgtttcttctttgtgtcactgattattgcaatcatggaagattccttttggatattttccttgggggcccttttacaggatctccttggagactcacatctcaactcaggaagctaaactctgtccctcttctgcgtctggaatgagctcagtgtagaatcaatgtttctcagtctgtgagtagtggataatatcaggcagaaaaggaggcattgattaatatctaccatcaaaagaagatcttttttaagtgccgaagcaaatgatattcttgaaagctaagttttgaagaaaagcaagcctctattttgaaggtctcctttacataagtaagacagcacactgggtgatatgtggtgctatccaggtgtggagggatccagcatcgtaaaaagcaccttccctgttgggaagagatttgctgtagagccaagagaaagacggtaaggctgaggcaaggagaatagaactgaggtgataactcatagcccgtccctttcctccacactttgactttcccagagcagtaggctttctatagaattcacaactcccataaaagcccatgtttacattgacatctcagcagtgtgcgcttttgcaggtaaggtctttagcagaggtccattgggggtagatgttagaggacaatcaggcttcccaatacctatgtgtgatccacatggaatctagtgatccaaagtgctcccacagaaggatggcatgatagagaagagagaccatgggagctggacatagaataaaatgcctacagaacatggcttccatagaggcaaatggccaaaatcatgcccaagggtaaccacaaatctcaaaagccaagaagaagccactctgtaaccagtgcatcagagaaaggcctatccttcagcaaaggccaaagaggacaagaaaatccaaggttcccctcagagacacagtgagggtccacaggcccacctagctgacagctggggagagagaagaaccttggtggagattaagcattcctccctcgaaggctactgtcaggaagaatgggacctggctggggtgttgggtgttatatgggtgccctgactgatctctccattctcctgcaagagatggggatggagctgcagcaagatgagaagcaataagcaataagcttatcaataagcaagatggcctaaaattgcagcacacaggaggctgaggcaggcagacgggtgagagtctaagccacgcgggctacagaatgtgactctggtaactctgcctcggatggatggatggatggatggatggatggatggatggatggatacatggatacatacatacatacatacatacatacacacacacacacacacacacacacacacacacacacacacacatatatatatatacacacatacgtacataatagatatggctggacagatgatagatagatagatagatagatagatagatagatagatagatagaaagataaagtgctctacacgtcttactctgctcaatacagtgcatccctttttaactccaggatgcgttgatgacacccagagaccctgccattgctttacattatgagcgtgaagttgaaatgaaacacatgtaatatcatataaactctatagatttatcttttcctctcttattaaattacttgttggtttttcattttatgccataggtccaactgaggggaagcagtacatccatgtgtgtctctgagcatggtatttttctcaccagcagcggaggaaatatagaaagtggaaagcatgtgcacactttcctagggatgcacgtgtggcatttgagttaaaaacagatcaaagttttcaggggaaaaggaaccacttgctagtgatggtcactttgctcacattacctgacaagccagaatgctgcgacactagaaccctggtgaatgtcccagaccactaagggcttgagggtgttgagctagaggtctacatggctgcatggcctgagcccaacctttgcttctcaccctctgcctcagcatagcctgtttaccctgtgatgcctgcatgctccacggacacgctgaacctggaaatacttcttcagaacatcagcctcgggctttagttgaccccagtgagaaccagcagctcactcatccactctctaagccaagagccttgatttttcctgtgttagttcaccgtttcaatgttctgccattctggtgacacattctttctgatcagtgtccccatcatggaaggaaagctcctggtgcctcttgggtggctccacctcttcagttcttggtctgaccaatcaccatcttcctattagctgagctgagctgccctggcagagtagcactcaggcatcactctgttcccttagatatcgaatgcttgaaaggattcacatgctggcctgaaggtaggattccctaaccatttggaatatgatggccagcaagagcattctggggaaagggcagatctttgcaaggacactgttcaagatgctttcatggtctcacttctgaacagagtctaaagaaactgatctcacaaaagagaagagaactatgttggtcagaggctgggattgttggagccgggtggagggagggtcaactggcaacaatgtttacagttgtaaactgtacaggagtagagggctggaaagatggcttgatgggtaatggcatggcaagggctcttctatgaaaccttgtttcaaggccataaggctgagagcaatagaggaagacccttggcatcaaatatggtaagactatatcaaagtagtaaaagaatttttaacatgcaagtatgttacatgccatgatttgatcacttaaaaaggaatagccctaccaaaataccacagtgtaaccttataaatatacacagttactgtgtgtcattaaaaactaaattgctttctgacattcaggaatcacatcccatagaacacaaagcatgtggtggccaataatgatgagttttctggagtcatagaaaaggctaaaaatggaccaattttttggacataaggaaaagcaggcacggggccagtggaaaccgagaagtaagccagaaagaaacggaagcttctccactcttccttactgcctccttcctacacacagagccagcgccgccagcattttgtcagccagcatcctttgtaatcctccaagttctcaggccagggaaaatggagactcacaaagacgcagcgaggacagcaccctggaatggccttgtgagtcattaccatgaattagatggcatcggcctatttttctcactgttgagtaatgacacttggttgacaaaaaactagcacttcatctttagaatgctcagaatatctcctcaccagtacccggcctgtttgtcttgtgggtggatttagcccccgaataagctaagaattcaccagctgctcgcgtgagcatcctgcccttctgaatcaggagttgattcagccagtctgccatcctgtaagctgcgcagttgtctccaggtccttcaaaagctctgtgctgtgttccctttttctttttttccctctcactcataaatgagaataatagcatctaccaagctgggctactaagcttaaaggaggttggtgtgcacattcaaacagcccatgttagcacccaggagatattcccaagtgctgttgtgaccaggatggtggcaagatcattctactacaggggccactcctggcatgagccactcagatgagtgctggccatcctcacctccggccttgattaccttccatggaggacagaaagtttttcaggttctgccaccaatccctcttttagccacgtaagaacccagagaacagctgggaccctctgcgacctgcctgggagtttccccctggtggggagacagcctgtgccttccacgaagttcttcccccgtttcctctttttctgggccagacctggataaacttgccgcttccttccttcaggctctctggagagctgagtgctacacacttgaaagcttgaagccttgtcatttccaccttgaacctgtggctgacctcgccagacagcctgagaaatgaattagtgtccgagagcagaggcagaatgtgagctgtgacctggctctcctgagcaacgttgcaaactgtcaaacggtacttaaagttccctttgcccaacccctttaattatgttgaaaactatgtcatattgtttttgaagaagttaatgaagccgtaggtaaaggtgaatggaggaacatcactcacttggattcctttgcaagcttttgataaggtccctcataaaaggctattaaggaaaacagatgaccatagggctctgggcagaagtcttttggctttattaaaaacgggttacattgttctagaaggaagaatcatttgtgctggccgcttcttggagggagacaggttaatcacaagctgtctccactgttggtatttagtcgagagatgctcgcgtgatttacaaagcgaggttggtcagaaacacaaaatcattttcacagttcaaaccttctagagtgttccaagggtgagcatccatcagtagggagtagattctcccggagggagagctgggcccacataaaaggtcaagcctccaaagatgggggaaagctcctctgagaagcttttggagtgagaactgtttctcctcgtggctcccggtggcaggcctgaggccagaggctgcacagggatcttgcagtgtccttcccagccttgcaccagatggtggctttaaggccatgaaaaatcagaaatgagtggcatggtagaaagcatctcagcaatacaaagacgcattccaaaacgccacagcaatctcgttcataaggacagcctgagaaatgccatgggcactcggatgctaaggacatgctctgataatttgtgtgtttgacctcccagcaggaagtaagtgagccaggcgatgctgagagactggctggtgcagacagatgtgaacagcatcttagcctacaaaacaagactagacagagctttctgtcgagaaactcagctccacgattgtgaggttctcgccttgtaagcagcagggtctagatttgatccccagaactcacagagaaaagctggggtgatggctcatactggtgaccctgaaactgggaggaggaggaggggggaaagagccacctggactgcttgaaggtggatagtacctgaagaaggaaagctgagactgtcctctggcttccgcatacatgttatttacacatacacctcgcacatacatgtgtgtgagagtgcacgagcgcgcgcgcgcacgcgcgcacacacacacacacacacacacacacacacacacatacgcttgtgagcacacataccacctccactcgccttgcccatcttcactgtggaataaaacagaaggtgttgttatatgaatacctaggtgctgatgagacgacgaacccccagccctctcccagacagggccctcactaatcttcatggcattgctccgagagccccacctgcacttcctcaagatcaaggcatcccaggcacagaagttgtaccagaacaaacagcaaagttacttcccatcttggttggctaaaactgcttttcttttgcccagtcaggtgcagctctgtccatactcgggacactcctcgtcctgtaggaagacttactgtgcaagacagcatgtgacggagaaatggccctctcaaagaggcccagcctcgcccatgataggtgacctactcagttgaccagagtgtagagcttctggtgagaagggttgtctgttaacaaatgagagtttatgtagagtgagggggagggggaggggaagggaaacagggaagaggagagctgggattgtaggtcagaggggggcactctgtctccctgaactgtctctcagtgacgagggagtgcagtagaagaggaagaggcccgggatatataccatatccaaagataaattcagaagggtcatagacctgaatgcaaataaaacattaagttaggagctttctggaaggcaacacagaagaaaagctttgtatcattgatctccacaaaagttctgggtggacagtttctgagggggacacccagatgagaaggccagcatcagtgatccttcagaaaacataaagctaaaaagacctccatgcccctttggaagtgttaaaaatatttctcaaagtctggccgcaatgaatccaagcaagggggacagatggaattctcacaaactcccagttcgaatgcagcagggagccttttgtcaatttctggtaatgttaaaaaaacacagaacccaggacccagcaaccccatgcccagatatttacctgaaggagaatatatatatatatatatatatatatatatatatatatatatcacacatattacacaaaaatgtttactatggttttcctagacaagagcaaccacatgccagtcaacaagtgagcagtggagtatcactcagcaatgaaaacagccaactctacacacccaacaacaaggatgggtacctgtgcgtactgctggatgaaagaaaccagatctgacaggctctgtgatgtataagtctatctatggaacattctggaaaagacctgtaaaacagatccatagttgccagactttgggaggaaaagaaggggttggttgcaaaggttcacacaggaaataggttggagtgtggtcagggcagctcaccgtgactgctagtgggtgcaagactgcattcttgaaaaccctcagatccccacctccagagactgaattttattacatcatctttggtcaagccaataaaacaaacaaaccagaaaacattcacaaccaaacagaaatgaagctaccgtgatgaaagcttgtgtgtgtgtgtgcatgtgcgtgtgcgtgtgcgtgtgcgtgtgtgtgtgtgtgtgtgtgtgtgtgtacatgtgtgtgagcatgtgagcgtgtgtgtatatgtatgtgtgcatgtgcgtgtgtgttcctgtgagaaagcctcgcctatgtatgagccacacaatagtggcaatttccttttcaagaagttcagctctgctcagagctctccttcagctctcctcagctctgctcaaggtgcagcccacagctgctctccttcactaattcatctcaagtgaccctggacccctgaccttctcattagctcaaacacatggagtggttaggcagtccctttgagctgaggctgctgctggcccccagctgtgaggatggctggtgttcttaaagatagcccttcaccttgaactactaatgctaatctcattaccatgggtgacactaatgaccaagatgagtcttcagcccttcctaaagttcccaggtgagactcctatgtttcaagacagaagataccttgtggagctgaacgcctcagcggtggggctggcccgggaacaagcagcatggagactgtatctggacccacagctgctttcagcttcaaagggaaaattttgaatcacaccaaaaactgctggggagacttccacggttaggtatttatttctccgagtggggagagggacgtggacatgaaggacatatctcaggggaaatgacactgaagggaagggagtccgtggcgctcggagctgaatgtcccttaaatatgtttctttccagaagacccctgtgagcagaagtgcacttcctgacaaggtgtccccaagggagtgcagcctgtgctgtgactaggagatggcagagttgaaagacagtagggcctggtggaagaatgttgagtcagtgaaatgtgtccttttcttgatctctgtgcttccggctgccatgagataagcagtaggcccaccacaggctcctcaaccatcatgccttgcctctccacaggcccaaaggcgatgggattaactaactggactaaaacctctgaaaccaaaacagtcatccttacatgcaaattaccttagttattttatcacagcgctagagagctaatatgccaagttctcgctctctctttccctccctctcagcccctccctcttctccacatatatgcactacagcatctaagtaaaacctcctggatactcagagtaggtacttagctcagggagccaaagtgttggctcgaaccttgtgattcaagtcagattaaaaacatggaatccaaaggtcagccttccattttccagcaggtctccacattaagtctttccccaggtacgtaaacaagcaatacaatttattttaaaaaacagctctcactgtgagtctgggtccagcactagtgaggtgtgtgtgtgtgtgtgtgtgtgtgtgtgtgtgtgtgtgtgtgtgtgtgtctgtatgtgtgtgtgtctgtgtgtgtctgtgtgtgtgtgtgtctgtgtgtgtgtgtgtatgtgtctgtgagtgtgtgtgtgtgtatgtgtctgtgagtgtgtgtgtctgtgtgtgtgtgtctgtgtgtgtgtgtgtgtctgtgtgtgtatgtgtctgtgagtgtgtgtgtctgtgtgtgtctgtgtgtgtgtatgtgtgtgtgtgtctgtgtgtgtgtgtatgtgtctgtgagtgtgtgtgtgtctgtgtgtgtgtctgtgtgtgtctgtgtgtgtgtgtctgtgtgtgtgtctgtgtgtgtgtgtgtgtctgtgtgtgtatgtgtctgtgagtgtgtgtgtctgtgtgtgtgtctgtgtgtgtgtatgtgtgtgtgtgtctgtgtgtgtgtgtatgtgtctgtgagtgtgtgtgtgtctgtgtgtgtgtctgtgtgtgtctgtgtgtgtgtgtgtctgtgtgtgtgtatgtgtctgtgagtgtgtgtgtgtgtgtctgtgtgtgtgtgtatatgtgtgtgtgtgtgtctgtgtgtgtgtatgtgtctgtgtgtgtgtgtatgtgtctgtgtgtgtgtctgtgtgtgtctgtgtgtgtgtgtctgtgtgtgtgtgtgtctgtgtgtgtctgtgtgtctgtgtgtgtatgtgtctgtgagtgtgtgtgtgtctgtgtgtgtgtgtctgtgtgtgtgtgtgtctgtgtgtgtatgtgtctgtgagtgtgtgtgtctgtgtgtgtctgtgtgtgtgtatgtgtgtgtgtgtctgtgtgtgtgtgtatgtgtctgtgagtgtgtgtgtgtctgtgtgtgtgtctgtgtgtgtctgtgtgtgtgtgtctgtgtgtgtgtctgtgtgtgtgtgtgtctgtgtgtgtatgtgtctgtgagtgtgtgtgtctgtgtgtgtgtctgtgtgtgtgtatgtgtgtgtgtgtctgtgtgtgtgtgtatgtgtctgtgagtgtgtgtgtgtctgtgtgtgtgtctgtgtgtgtctgtgtgtgtgtgtctgtgtgtgtgtgtctgtgtgtctgtgtgtgtgtctgtgtgtgtctgtgtgtgtgtgtgtctgtgtgtgtgtctgtgtgtgtgtctgtgtgtgtctgtgtgtgtgtctgtgtgtgtgtgtctgtgtgtgtgtgtgtgtgtgtgtgtctgtgtgtgtgtgtgtctgtgtgtgtgtgtgtctgtgtgtgtgtctgtgtgtgtctgtgtgtgtgtgtctgtgtgtgtgtgtctgtgtgtgtctgtgtgtgtctgtgtgtgtgtgtctgtgtgtgtgtctgtgtgtgtgtgtctgtgtgtgtgtgtgtctgtgtgtgtctgtgtgtgtctgtgtgtgtgtctgtgtgtgtgtctgtgtgtgtgtgtctgtgtgtgtctgtgtgtgtgtgtgtgtgtgtgtctgtgtgtgtgtgtgtctgtgtgtgtctgtgtgtgtgtgtgtctgtgtgtgtctgtgtgtgtgtgtctgtgagtgtgtgtgtgtgtgtgtgtgtctgtgtgtgtgtgtgtctctgtgtgtgtgtctctgtgtgtgtctgtgtctgtctgtgtgtgtctgtgtgcgcgtgtatatgtttgtgcgtgggtgtatgtgtgtagctcatacactataaccgtcaacagtcacaaaacaatcccagtgcaagtcacccttgctgggctgtaatctcaggacctaaaggggacactgagctgcccacatgtagttgaaatgggtgaggactgtagaagagaaggaggggcagagaagtaggagccagacaccatgggagagaggaaggagaagcgagagagatggagacggcgggaagaaaggaagagagggaaggaaatgaactgagagagaagaagaaagaggagggagggagagagggagacagagagggagagagggagacagggagggaaggcgagtaccaagggtgggaacactgaggtcacacataggcccatggaagacagaggtatgagagtgggaatagcccgatcatctggaagctcatggtttcaaggccaggctgctctctgaaatcacactaccctttgtccctcctgccatagccccatctacacgagacaacatgatgccaagccagcagctgaggcaggaagagggagtccaggctgctggctgggtggcccagcctgcttcccctgctcccctagtgccagagccagagccagagcagccaggtcagggtggtggggagtggctggcagggccaggctctcacatgctctctttcctatggccaggcctgctttgctggggctgggaggggccgggcagcagcagcagagagtgagaacttccccttgccagagccagctgctggctgccatctgggcaggggcagtgccagttttccaaatctgccttccctttggagagccggggaactctgtgctggggagatatcttcccctcatcccgaggctctctgttgaaaacccaacccaaccaggctcagaaagagggagggctgagaaatgccacgggctgggctctttccagggggatttactttgagcttctccttccaagaaaactcttcattctcactccgtatcctttggttctttcattccacttggtgataacctcctattgtttcttaatcacatgtacaaatgaaacaatgaaatgccaacagctcgcttagccatcctacatgccatctagagatggatcctccaaagtgaattggaaattccccgagaacaacaaaatagcctttataatctgctgtccgccatgggcaacctgaacctcactagtgatggagatgtccctcactgctccatttgatgttcagccatcgtcttctacagtgtgtgtgtgtgtgtgtgtgtgtgtgtgtgtgtgtgtgtgtgtgtgaatgtgtgtgctagaagtcaacgctaggtctcttcattctctaccttatgttttgagacaggatctctcagagagtctgacatttggtatttggttagactgactgaacaggtaaccccagggaccctcctgcatcctccttagcaacaggattataaacccacactgctgtggccaataatttatgtgagtcctcaggattcaagctcagatcctcatacatgtgtggcaagcacgtgaccaactggtccatcctctcccagcccacactgagcacaaggctttggaaaggatgaagaactgggagacctggtgctgccttcagagttcagcctatccatggcggcccatgtgggatctggaagcaagtacctctgctgtctaccatcagccatgtgtgtgtccttaggtgagatggcctgagaccacatgatctctattctgctcctaccatgatcccaggatgtggtgccaagaagagttgtcccatagacttaaggagaccctggatcaacccaaaactcagggtgagggatataaccatcatgggtcccccttatatacactgaaacacctggatttgagtttccattttcccttgccttctgggttctccttgttttctatctaaaggcatcttctgaatgccatgtcaagccaacccaaggtctcacaattgttaagactttgtaaaacctcctgtgcttataggcagggaacccaatgtcacagagatgcttgggggtggggtatgcgtcaccatggactttccatattagctggcatttccatcctgtggaaccacctggtctgtacatggtaaggatgcactgtaaaaggctttgcaggcacataggagcaggtactgttctagggcccagaagctaactccctgtttctctaacaaacccttgagccttgagattggatgagctacatgagctgtggctgctgactttcctaaaggtccccagtcacagagtcattacccaaacccacaccctccatccgtgcacatcgaggtatggctccaggcagacctgggctgagacacaagaaggtgtttcctgccccaagagccagcaggtaggagatgaggtatgtcacatacaatgcagaagggtgggaccattgccggtgacttgctgaaatgccaaggtccagatgatgattctgagacaccctcaaatgatcctggcaatggaaagaccttcgtgtgtcagtctggaggatggacacatactcttgctgcgaagccaaaccccaaatgacaatagagggacctgttgggacactgaccgaccaagaaaaaacaggtctgctcagagagcctgaagcttataccctacagactctgcaccacagggatgcttgctcagccatgtttactgctgctctattcgtagtagccaggaaatggaaccggcctagatgtcgtcaacaggagaatggatgaggaaaatgtgacacagtggaattttacttggctgttaagagaaaaaatgaaattatgaaattttctggaaaatagaatttattagaggtaatactaaaaggtattatattgcgagatgaccccatctcagaaagacaaatgccaatttcctcttctgcacagactgacttgatgatgggtgtgtgtgtgtgtgtgtgtgtgtgtgtgtgtgtgtaaagaaacctaagagtgggactagatgatgaaaccagatagggaaacgagaggtggtaggggtaaaagtactgtgacaggagagaggaaaggggacttctaggaatggcaaagccacaaggaagagaagaagcacagagaaacagcaagaatagaatttcacttgcaaaatgccataatgaaacctcattattaataaaaagtaaaataaaataatgaaataaaataagagaaaatagagaaaaacttaagctctgagcctggggcagctccttgttgtaagcagagaaattgttagcaaaattcaagatacaagcatcctcaagaggcaccacgggtcagagtagaagatgccaggacaggttttcacaagggcacacagtatcactcttcccatcacttccaccaaacacctggcaaggggcagcccacaggaggagggcgcgctttggctcaaggctctgaagatgcagtccgtcagcagggaaggtacaatcgtggggctttctttgcccctgtctgtgcagatcaaagaaaggggaatgtggaggcccatctccgtctccctcttcacttcatgtttgactcaggacccaagcctatggggtcctgcctcttgctgtcagggcacctctttctagttaatcctccctggaaattcccccacagacacagccaggcttctcttaccccacacaagctgaaaacggaagtaagtcttcatgggtggggatgctgcagctactgctaaaccccaaagggtaccccagcggctctgaaacccaggccccatagcaccttcacttttcctggctctggtctcagaacctctgcactagaactgaaggggtaaataaaggatcgtgacaccgacagacaaaagaaggaagatacatcagagaccgagtaaactttgagcacctagagaggacaaaggagcagtgaagagagtggaagccagggacccatgttgggaccagttggtggcccactactgctgtccagatttggtctctccatggatctggactttattgctatctaagacaaaccccgacattgctcactcagaagacccccactggtgttctgccctgggactttgacagctgtgccgaaagccggaagcgtttcctgtgcccttgttgagggatcatcagagcctcagagaactgcacggtagacactggttgcatggctccaggcggtaggggactgacactctgataatatgtctgacccatcactgcagtccctgggcctcctcatctgtgaaccaagatggacttagaatcttgggtcagagaggatactcagggagagcacaggtctacacaaccacatcccaccagtgaagatttccaggaaaagcacaggtgtacaccctcaaaattttctattttcgtatgaactacgagggttccagatggtccccaattggagctttattagaacagaccaagaccagccattgtgggcacaaacccttccacccacaagcccaccgaatcctcccatcaggctctatgcataacaggctcacacaaggaacccccacaccagaagactgcactgttgatttttcagaaaataaaacaacctatgagttttatcgctttatctcctcagtccagagtggggaaaaaggacacaatctgtcctcccagtgggatgtccccctgattagatgtcatgaaacagagtcgtcctttagttaagaattgctggaatacctccgacctgtggttactggaaaggagaaaaaaaaagaaaccctaactacagatacactccccagggcttcagatccgtttagcaataagctgtgttgtgaaggaaacctggccccaaaagatagtttgaatgcaaaataaagatagttcacaggctttgaagcaagtgctgggctcctggggaagcaccagaaccatagttttggagggtcattatatttcctgcttcagacatcatctgggtctcaccgttcttttatacaacacctatttttagtcattacaggtgccatgtcctgccaggcaggggccccagcagggctggcttgggcaggaggtgtgagggttggttgtccagagaggcaggaagctggacaggctggaggaaggccagctccatgccagaggtgggagtggggttatctctgggttggactgtgggaacaaacctggttcgggagcaaggctctcaggactagcaggctggaggattgttgggaaggggatggaacacaaacagcctaagtgagtaaggactctttgagctcttccatctaacctgccacaagggactgggctgccgtgtaagcagagctgtaggatgtgtgtgatggaggcaaagactgagactgggatagaaaccacagaactggaagcagagacaggaatggggtgggggtggaggtggggatggtacagagagagagacagagacagagagagacagacagagagagacagagacagagacagacagggagagacagagacagatatagagagagacagatacagagagagacggagagagagagcacacagagacagcaacccagaaagaagaccttggctagtcagaaactcagaggcaggaaggtaaaatcttggtctttcttaagtacagggtgctgctttctcttttgtttccccacaaagtcagttaattctctgattgttgctagtacctcaaaaaggttggtcctttttgagggcatgtgatagagcccagatcccagctttgagaaggtccgaggctgaggagaaggttcttgtgtgaggaaaaccgtgggtgtttcacagaagatgcaagcgtttttgagcaacgcttcagcaaatttagaaatccttttctaagaaggtgatgggggtagctgggctccctgcctagctcaggctgaccttgaactcacaaactattctgtttcagccttgtagatgctaggatggcaggtgtgaactgccaggcaaattttgaactaagtgtccctcggagtcacttagttcccttggggaagtcaaatttataacatgccagtcactcagtcccttggggcactgaaatacatcagtccttgtatcatttcacaaagacacacaagatccacacactgttttctgagctccactcaggcacaagtatgtgcggacacacatggatacagtcacaccaggacctcccatggaggcaaacacatatccgtgccaactgtgatccatccactggcaatacatatcagcccgtgagaatgtgggcactactgtgaggactgttcgttagtattaaaatcatgtcactgttgaagcacagaaaagtcaaatttataacatgccagacacttaatagtagaaaatgcaattacacaccagggaagccaggccttcaaaaccatcacctcacaaaacgcccatgtctttctcagagaaatgctgggtgaaccaaaggaacatccgagatcatcggacaaagtcagaacagaagcgacaaaggacagggtaacccagcttagacaatagggatgcaaacagccggtgaaacacacaaatgagaagtttagcatgacaggcacagtggcccacatttcacaacccaggtctttagcccaaggtgactgaggcccttccttaggacagacatgattggcccaggtggaaggcccctggcagggtcaccatcactaaggacagtttgtcttttgagctcccattctgggctgggccttagtgagcaccaggaactcaaccttgaacaagagacagtccttgtcctcaagaaactcaaggcatttggaagacaacctgaagacatagcttaaaaatgcagagtctacaaaggacactgggaggccgcatgtgtgtgtgtgtgtgtgtgtgtgtgtgtgtgtgtgtgtgtgtgtgtgtgcagggggggtgtctcacatgcctgcctgtcaccacgctcattgtcttctctaaaacctggtgcttccttgtgtctggttgaccacctaagcctttaaggaccagacctgcgccttgcccagcccctgttctggagtaggctgtttagtcagcacctttgcccaaatgctcgctgacaaggctctagaagcagcttcaacactgaaatattgagggtagagccaaggcaggggacatcagcctagaacactggctggctggggtgatgaaatcctagaggaagacaggacacagaagcaggctgaagggacacagtggaagacagaacgtaggggaaagaagacagggctgagagaaggttccatgggtcgtgtgcttgctgtacgaacgtggcaactaagtttggatccccagaaccagatgccagctgggtatggagacccgcctgtaaccgcagtattcaggaggtggagacagggatataagttagctgactaaaccagctcaactgggaactccaggatcaaatgagagacactgacttaataatatacagatagagtgaccaaggagacacccatgtcaacctccggccctcacacaagtgtgcacacaaacatatatcacacatgctcacagaaaaaagcaacaaagacaggctcagaacagctggatgccatcactcacagtgtgaggctaaggccgatgtgggaaggtaagtcctgtccagtcacgggggattttccaccacacagtctttcagggctgtcctcgccagctacaggtatgacaagaaagtaggggacactggcatgtttggttaaagaaagtcaccaggagaaggccgtggaaagtagaagaggcaagccagaggccaaggggccagttaaactgggagacagctgcattgaagaacccggccgtgatggggcctgaacagagtggaaggagtgacataccaggatactgtcttacccaggccagcctgaaagactcccaggcacacaaaatagttaaaaaaaaaactgactctgaatgagaaaaaggcagaaaggatcttaagcacacagccatcctgcctgctcagcagtgtctgtccccaagggcttcacaccacgctcacacctcggagtgcgcccctcccctcggcagtgatgaagacatctaggtggccagagaaacactcaaaagcatggagtgagggagggaaagtacattacagagcctcgcatctgcggcaagcagctgccaagcaccctccatgtgttcctgcagctgtcggcatgagagtgatggaaggtgggacaggaggaggaaaagaacttgaactgaaacacactgtgggcaccaggcaggtgggtgggctctgcagtgatggattgatgctgaccctttgggagcaccgagagccagagccactggtttcctcggaggaaaatggccttacagagcccttggttggctaggacagtcctcctgccatgaagagcagatagtaatgcccattgcctcaccagagccactggccccggaaagctgtcagactgctccaccaaaaccccttagctggattgcaggaccccgtgtctctcaaggcgcagtgtgagacatcatcttggccgccaaggatgtaagtcctgcctgtacagggtgtaggtgtggtggtgatgcctgtaaccctgtgcctagggacctcttgccggaggatctgcagttccagcccacttgggccatacctctcacaaaacaaaagctgaggtagagagggagaattatctgagaattttgtgagccctttactgccaaacaaacagacatgacctggggtaaggtcatccaaccaaaatatggaattactgcttctgatgttctctggctacaagctgtgagacaaagcctgggcattgtcctccagtagctctggagctcagtgagtgtctacacagcacacaggagtaagacaggctatttgaagttttacttattcgttttcattttgtatgtgtgtatgtttgtcctccaggcaagttcatatgccacatgcatacagtgactccagaggtcataagaggatgctacagataagtgcgagctgccgtgtgtgtgctggaaaccaagcctgggtcctcggaaagagtaaaatgtacttgtaactgtagagctgtctctccagcactaacattggttttgaagcagctgaaagagacacagaaagcaaaatacgaatgtgtaccatgccttccagcccagggagagttttcacagctgtgacctgggtaagaccatccgcacgggacaggcatttcagatagtcatagctggtgactcttctggttggccagttctcttggagccaggggctaaacttaacgctttgaagatcacacatgtccacaccaaacctgcaaggtcagtgtcgggcccctggatgcaccctcatgagggtggactgaaggttagaactctcaagggctgccactgtggataaagaggaagctctcaggaagatctacaatagttcaaaaattgaagaaaacaagtgcctgagagtgagggcatagaaagagtgtgtgtgaccttgtaggagaatcaagcagtggctgagcatgggtcagtgggtcgagtctttggcatacagtgtgaggaacctgagttcaaattcctagaactaacataaagcagagtacagtagcacatatccataatcccagcacttaacacagaaatgacagagagtcctggcaagctggtgggccagtacacaggtgaacaataaaaaaatcacatcctatctcaaacaaaataaaaagattttccaatgacttccatgcaagcactgtggcataaacatgacccccttacacacacacacaatttaagtaaataagggtatgatacctccacactcagaacaaggtgagggatgggtcatttcttggtgggggcttgacagcggatacaagctgcattgggtgctgtgagaaggcaccatgaccagaagcaatcagaagagtttcttttgacttaggattctatggggtaagagcccgccatggtgaggagacacggtggctagcagggtggctagcagcaggtatggcagcagggacaggaagctgatagttcacgtcttgcaccaaaagcctgaagcagagagagccagctggatgtggcaagaggctcttaatctcaaagccctcccagtgacatactttctccaacaagacggaacctcctaaaactccccaaacactgccagcaactggggaccaagtgttcaaatgcctgagactataggggacattctcatgcaaaccatcacacaagcttgaaggaagtctggttctgactgggtttcatgcttggttgtggtaggaacagatctggagacagatctctaggttcaaagcccagctctttatgtgtcaagtgagaaggggaacctggcctctgctctatggttattgaagaatggccatctaggtagaacacctggaccagaataagcttggtgtgcagccaggtggcaggcaccttccatgaggcctcttcccttcccacttgcagtgtctactttctcagttgtcagcaacaggacttgccctgcttggacatggattggatagctaagtatgcaggattaccagaagggccaagctactggataagaaaactgatgggaacccaaggactctctttcctttctctttccttgagcgttgcactggcttctgggagcaatgtacagacagtgggcttgcctggaggagcttctgcccctttaaacggctgtcaataatccttgaaggctttgtttgtttcacttaaggctctctggagaaaaatttaaggaaccagccaaatttgcagccattcttctaggtgacctttgcttattataatctcattatcatggtaaattttcagccctggagatgttcctgtctgccattttcgaacatgtgatatatgaggaaccctgttttcaaactgagcatgctccacaatgtgtctgcctctacatatgatggtggaactttccaaaactaatatacatgagtttccatgataaaaagtcctcatgatctgtctgctggttctatatactggctttgtactcaccaagaggcaaacccattgtgccatgctgcaaggtcatgctgcagaggcgccctggcctgcagaaacagcccaggtgctgtctgttatcttggaccagtgttatcctaacaccactaacacctcttgacatctagtctcttttttcccatcaccagcttacatttccccctgagccccatcccaagaagctgggagaatatctccaggtgctgatgtcggtaatagtctcacctcagtcagccccctactgcccactgccctgtgaatcttaaaagattccatccttattgaagtatgagctgtgctagctaatttttttcacttttacacagctagccattgacaaaatatccacatgaagaacccaaaagaggaacaattttagcttcaggtttgtttacactgtcagctgtactgggtctctctctctctctctctctctctctctctctctctctctctctctctctctcccatggtgaggtgtgacattgtggtggtgggagcacatagacgaggaaacagcccaggggcaagataaactcaaggcagcagccccagggactcattcactctggctagatcctacttactgcctaaagtctccagaacctccctgtggtatgacttttcctcaggagatgtggacaaatgtcattctccaaagaaggatgccgacaaaaacaaaataatcctacccaagcttgatcagtgaaacagtaagcttcttgctgttacttacaggaatatgagtggggggaggggagggttgcctaaaaggacagggatgactcaaaggcggctgtgtcaccaacaatcccaccccagcacgggtgatgactcaactttgctgcatccctgagctccatgaggacttgcagacagctctgctgacaggagaacctccagtccccagcaacggtccttgtatttttaactttggggaagaccttggtgaatcctgtatgtttcatgagcttcctaagacttgtcaggtgtgtttactttccaaatctgagcaacccccccccccttggaggaaaaaagtctcaatttagagaagacacaaaatagctccagttacagaccaagtcctcaacacatgaggggagtcttcccttcccttcccttcccttcccttcccttcccttcccttcccttcccttcccttcccttcccttcccttcccttctttccttcccttttctattctattcttttttctctcttttctgacacttcttgtctaaaatttaagtactcaagctgggtgtagtagttcacatccaaacactcaggaggcagaggcaggaggatctctatgagctcaaggccagcctggcctacatagtgagtccacaacagtcagagctacatagtgagaccctatcttgaaaagcaacaacaaaatcttaggcaaaaacaaaaataaaccttaagtactccaaggaggagcaacattttatgttcagtttttgaacttgtgatccaattgataatgttcttttcaggacacaaataaggcttagaatcaaaggcacccaaggctcatcaattgtttaaaattgatccacatgaggctggacccagaaaaattcctggcagtgccctccttcagtgagtagcttcccaaatccttaaaaaaaatagctttagaaattttctgagaatttcattttgatcatatctatcctccctccctcaactcctccccgacacggcccccctcctcacctgccttcctgttctttctatcttatttaaacctatgtagtgcaatcagggttgcccaaatactcttgggagtgggggatgccctggtgtgtggccagcctgccaggggccacacctttaaaagaaactgactccttttccagcagctaaagatggcgattaacacagagacccccagctgtccaaagtgcagacaataagatttcagagtcacacccctccccacaaggttcagggaatcttccagaaacagagggcagaaagactgtaagtaccagatgtgatggacaactccagggaaagagtgttctccaggcacggcagggcagctgcaaataagaagcagcagacagacagacaaaatcccagcatggaggaggggaggcagacatgaggccctacccggtcttactaaatcttattgcactcgctagtcatgtctgggaggcctggtcacctttcatcccagatagagacctggtctctaaggggagagtgtcatcatgcgagcaccacgagggtctgtgaaccactcatccaaagagcccaggagaagaccagcatccttgcacaaggtaagtcgccttcttcctccttgtcaacatgggtctctggcttggatggacactacatagcctttctcctgtccttgactctgattggtttcgtggccttttctcttttctctttaggatctagatgactttgcagtgtgcctggatgtctcctgaagtaaaggaatagctgcattctatcaacctctatggccctgaagaaaacctttaagtagcattaggaggcagaaaccaagatcccacagccctatgtcagataattggatggtaacgcctcttccgtctttatgctactgccgactcacccacccatgctccactttttacttcgtgtaaatgagacacaaatcaaataagaagccactgtccatcgacaagttggtttaaatgccatatttctaatttttaaactcatactaaaattgagaagagctaaggacaagagagggcccggaggagcctttgttgactctccatggagtctctccagcttgcatccagagagcctggagtgtcaccatgctttccagacacactgccatctgtaggtatgtggaggtgattccaaacatgttttccttctgtcttttcatctggattcccattgtcaagacacattgaattatgggtctggcatggctggagagagcacaagaaggtggccaggacaccacagctacagggaagggactggatcagtccattctgttgcaagccacaccagagggagtatagccaggctctgcaccacatcacacacacacacacacacacacacacacacacacacacacacacacacactggggccttaagcacttgtctgttccaaatgtttgttaatttctcacctacttggaaacatcacttacttctcagcaccagctcaaagtaagttaagaactggaggaagcatactggcagtttagcagcaagacctggggagaatttgcatgagggcctgagggtgtcacctcggatcagcggtgggacaggagctgcatacatcggcagctgtcatgagtagggtcatcctgaagaatgagttgtcatagaaagcccaggagaattgtccatgaagagagctcagaatccagatggtttttccttattaagatgctcgttgcttaggaccagtttagtaaacataaattctgttctaaatcatgcccataaattgtgttaccaggttttaaaaaaaatcaatgcgttttaattacgggtgtgtgtatgtgtgtgtgtgtgtgtgtgtgtgtgtgtgagagagagagagagagagagagagagagagagagagagagagactcacggaggctagaggtgttgtattccctgaagcaagagctactagtttgtgtgagccaactaacatgagagctggaaaccaaactcaggtcctctggaagagcaggaggtactcttaatcactgagctgtctctcctacctggttgtctttctgacttgataattagaaaatagcaaaatttgaaatgcaatttacttgaacactagagtgtgtatgattgtggaatgggacatggaacaagaacagaggccacgggaggggaaagaggtgttggatgatgggagactagaaagagaaaaggaggttggggctggtgagggacgaggaatgtgtctgaaaatttttccccttctgaaattgtctcttactacatccccacactgtaacacatgctccttgacttctgtctattttatcaagactatactatatctaatacatagtagactgtatactcctgcaaaaaaattcacaaattccatggaacaagagagaaataatatgtatctttcaactttctgtgttaacctctttataaacaaataaattcatattgcctgggctttaaacttgagagccaaagcataaaacttcagttcaaataaatttacaaatatttaccatctcaaatcaaatgtacgtaattggtcttttttcattaaagctgttggctcaagttattatatttcattttcaacgcattgttaatttcctcttattttcttttatcattatgttaagaattcttagaacaaagctgtcttttcacctaggttaattctgtcttatataaatatattttgatacaaaattattaattacgtttcttgatatatatatgtaaattagttaggcagttagtaaattttgaccaaaaaatcccaataaacacatattccaatggtaggttttttggcatctttagcttaatttaacgtattttatatactgttaccacttgagcttagaagcgattgggggtgcacatgttgtttagttagtgttttctgcaaaagtcccaactgttgctgtcattctttaccagagaaggggttatcacatggctgcttcccattagccctgcctgtctcttgcacaacagtttaatggcccagtgccctgccacaggggcagctgtcatcgtcttggcccttactatgagaagaaaaggaccgaaaacaagatcactcgttgaattgcctgtggcctcttcatctgctcttctctttgatttgcagagtgaagagaacccgctgaaggcttccctggtcttctcagtaacctcacgtatcacttactcttacaaagagagacataattttcatattcacaccagggacactaattcattctcctttggagctctgtgtgcatgacctgtgtgtgtgtgtgtgtgtgtgtgtgtgtgtgtgtgtgtgtgtgtgtgtgttcctgcgcgtcattacagatggatatctgccatcacatgggcactgtggaggtcagggaacaaggacaacccctcccccgcgtctttctcaccttccaccttgtctgagacaggagctcttgatgatcccactgggtgccacagacaatctggcccaaggacttctgggattttaatgtctcagtctctctctgtgtgtctctgtctctgtctctctctaagagcattggaattatagaggggcactcttgttcatggcttctcacacgggctctggggatccaaaggcaggatctcatacacgtctagagtgattgccatgagttcatcacgacccttcctagagcctcccacaagggttctcatggggcattctcactgtctggccttgtcatccagatattgtcactttcacttaggcattctctcatctatcagaggtctcttcgtttctcttggcatagagagacagacatcacctgcttagccactctcctattagtgaaaactatggctgtttccattctttggctattatgactgagatgtctataatcattttcatgaaagtcattttgtaaacatacattttcactttcttgagtaattcctcactaattttgtattgctggaccatagggtagacttagattcaacacttgaagaattctaactagatctccaaagggattgtgaagttgtacaatcttattgaaatacatgacaattctggttcacatacacacaaacacacacacacacacacaaacacacacacacacacacacacacacacacacacacacacacgtttggcatgaatggattttttatctttgtcattttcttgtagaacataacttattaggattgattcaaaaccatggtcacattttctctattgctctctgccagtatatgcaagtctcgaggttaggcttctcttggtctccggtgtgtctgcaaagtccagaaaattgtatggcatgtcattgtcacttatcaggagtcaggaggaagagatgtcccctcaccaatgcagctgtgaaatcgcaccgccttcatttcctgttcatcccaaactgtccataataaccaacacctccttaagtgagtgccttgctttctgccaacgccttgtgcagtgcctgcttctcccaagctggtctgctgatctgacgtcatagagactcctgcctatctatatcctaggccaagccctatgttgctattgttcctcttacaaacatatttctttacttaccttcttgtttatttcttgagctagaggctcacatggtccttgcccttgatctcactgtgtagtctagggtgactccgaatctctgatcattctgcttcttgctgcctgagtgctaagatcataggcggaactaccacacatgttttatgcagtgttaaggaccaaacccaggacttctagtattctacccactcaaccaggtccctggtcctccttgcacaaatctacgcaccatatttataaagctgcagctttatcaggtaacaggcagagtcattattaatacatatagctgtttgggtggacttttttttaaaggccagctgcttaccaaagccaactaaccatcaaactcggctcaggtagaccatgttggacacaaatgctcccactcgtgtgccttgctctgctgagcgtcactctccctctcatgggagtgtttgagtctgatcctctcagccaagtggcagatggagaaattgtttgcaatagggatgagaatattttatcagacttcctacaaacggggcccactgaattttcatctgccagctaagcactgatcaaaataagggaggggtgctcaacaggatatcctgtagggctcctcaggagcgcgtgtgttttgggtcaacagtccgtggagagatgataaacctctaagggcaaaggagagcaccctggaacaaacacttccctggtccttccagccttccaaaggccgctcagcagaagggaacctgggtcagggtccaggaagtctgtattccagacctggttctggccttgattccttaggtcactgcctgttgatgatgtcacttttcagtacctcagtgacccgtctgtacaatagaaagactgagtcctcttcccagcacctgggttttgagtgcacaggggaatgctcatggcagcaggagagcaggccacaagttgtttatcaggtctcttgttcttgtccgctgcacgcacacagcttcatgtgataattgctaccgatgttcattagacaattactatatgccgggtataggtcaagtagatacgtgtgctcaaggcatgaattacctctgtcaacactcatcagcccccgggaggagatgcagggaaggtcaccaagaatatatctaagagaagatcatagtagcagagaggccaaagactggcattccagcagttcctggcatctgaccagcagatgcttccagaaaccaaggctcatgacagcctgtaaggagctacactgcctctctctcttctccctcacaaacacacacaagtaagacgccaaatacaagggctgctggctctgcaccagcccaacgaagagccttggatgcatgttgtctgactgcccgttgcatcgacccttggagtaggtatcactttaagctccaagatggcagagttgagacacagaaaggaacttgtctgagaggaaaacaaggagacgggggctttttcaaaatctaggagttgtttttctatgtactacccgatatggcttcttagtgagtttcaattctttaattatctttcagttgagggaaaactagtcttccctaaagatgtgtactgctccctcataagttatactatactaagtggttagccctgaaatcacatacatacagtaggttgtgtttaattagcgctctctctctctctctctctctctcccctctctctccgtgtttgtgtgtgtgtttgtgtgtgtgtgtgtgtgtgtgtaagcaataatcacagaaaaagagtccatgaatttgagagagattaggggaggaccaaacaaaagcagggctcaagtaggaggacatgagagaggtgggagagagggaagggagaaataaatgatgcaattatattttaatccccaaaacatatcttaattataattaacatattgtttaaagtaatacctcaaggaagggctgttggaaaacaaacaaacaaacaaaaaaaatagccctggggctggagagatggctcagtggttaagagcactgactactcctccagaggacctgggttcaattctcagcacccacatggcagctcacaactgtctgtaactccagtttcagggaattccacatcctcgcacagacacacattcaggaaaagcaccaatgcacgtacaataaaaataaatcataaaaacgtacaatagtcctaagaacagaggcgatagtttggtgggcagggagacctgagtcccgtttctgctctgtcacttggagccggatgacctgcataagctgctcggcttcttcgagcctcatcttgtgactcagaaacaaagtgaggactggagccaagccctggaacacctcacgagcacccggagttgtctggacactcagagggagagcttgtgcagagctgttctcagaagcctgtatggcatgtgctctgtcattctgggattcaggccccggccagcacaggagggactgcaggtggcatggtggggggggatctgtgtcccctctgtgctgcaaagctcctctgagccccaggccctttctgcggctctcagaaaacacaagctggatccaaggcccctgttccaggctcacttgtgtttaccacaccatcaggagggtgccatttagccagaaccatcattcgcagtcacaccaaatggcccatggaagaaaagttggttccgctcaaagaacagatgacaagtgacaggccccgctcctgattccccacaataacagaagacaccagcaactgccatgtggcccaacaccagagcacacttctcctttcaagccctcgtgatctgctgtatctgcccctttccagagacagaagaacagccccttgtcccctgtgcagccaggcacccctgcctctaaagccacacatggccagcactccggcccccagtgagtcctgacactcacttaatttctttcctttctcctttgcaagtaaaaacaactcactcgaacccttaagagtatgcttttatctgttttcagcacacacacctgacattgggcacattgcattaactggccacttcccggtgtgcacagacgacatccaaactttttttttttttttttaccttttgttatttttaaacaaaaaatattaaaaaaaaaaaaaagaccacttcatcttactgtatctggcattcacccagtgagcaggaaggggaaatagtttaagatcaggaaagaagggaggagaaaagacgacagacattctcagccccaagcatcaatggacatggttgagtctgccttgctaggcaggcaacatctctatccctttattttggctaaggaaggaaaccctaaccttctccaataacaagtgaccattgacctgaggcctgcggatcacctcaagttccagtcagatggatgaagaattcccccagtctgccctgggctaatcatttagctccaattctactgttagagaaccagagtgtactcatgtaatcattgttatttaacttttacaagatggaaccctgataaatggctgagaggtgtccatttttgcagctgcatggtttggcttgctactttatcccagccactgtcctggggattgaagagagaaagacagcccagagggtcttccgtaccctaaagaattagttgcagatcggttgtgctttgtgctatgagaaagccacttgaaggacagggggcagtgaaggcagcagtgccatgtcttcacaaggagcctgcttcctttcccaggagttctgatccaatgggaagcacgaatccctcttcttgctcccatcctctgcagtgcacacccagcgagtctgtgtctcaaagcctgagagcgggtgagtctggacctgtcaacctcaactgagtctctgaagcatttgttatttttatgggtccctgaatgcttcccttgaatattaattttcttcaattctttaagtatatattagttattacatatttttgattaatatttgatggccgcttaggctgccaagagcacccataaattttcccaatggaatctgatgctaggtgagtgtgggagaccccttatgtggagcaaagacatcaatcattttaagtctctgactccacaccttaatgcccaaagatatattgctaagaagcccataacacgtcattaaaaatgaatgtcttgtggcagttttcatgcctgcagaattcagggcagggggtggggtgggaatcctgaaaccacagaacccagggagttcacaaattcctctttgcacacctttttaaaatgaattctttgttcttctagagtcagctacatgacttcagggcctggagcaaaagaataaaaagtcttcaaaacattatgacgtattttgacataacaacaggaaagattttcaccaagcttggtgacttccaaagcatagggtcctgtgcagcatcacaaagtccatcttgcttctctctgcacctcctcagcatccttccctccttctattataaccttggcctctctctgtgtgttttttaaaacaatatatatatatatatatatatatagagagagagagagagagagagagatacatacatagaaaatagatatagattggaagatacacagatgataagtagatagactataaacaatagatcatagacaaataatagatgacaatgagatgattgggagagaaatggatgatagattatagatacatagaagatagatcataaacagaaagatagagagggagataggagatgattgttagagagatcgatgataggtaagtacatagatacatattataaattgaagatagacagacagacggaatgacgggtaagtaggcagacagacagatgcaggtatagacatgatgtccacagtgcttcgtttccacacagagcatcagtgaatgctgagctcacatggatgacagtcagtgtatgcaggagaccactgtagtagtgttggataaataaatatgttagcttagcctggtttagaagaaagtctaaagctgtaacgcacagtagaaacccatgaacaaccttcctctagtcaaggcagactagcactaggaagctatataagaaagaggagttcctgtgagatccagatgcccatttgaacaacaacaaaagacagaagagactccatccatcttcaatctcaagatttccccaaaccaaactggtctggaggggacctgctcccaatcttggggacactcttccatgacagcatttcctatggacatattgagcctttcacccttcagtcctgccagctcctgagaaggcactgcctcagaccacaggcctctcttcagagtctatgagacaatgtgtttctacttactataaagagctttgtactgcaggaggaagggtctgtgagatgacagtctttctgctcactataaagtgttttgtcctgcaggagggatggttgtagagaagcagggacagcagttgtaggatatcttgttgtctagcagcaaggcccggaggaccttgtgatggggaatgtactgtgtatgtttatcttattgactgttaaataaaatactgtttggccaatgagacagcaagttagacgggactaggagtcaaagaggattctgggaaatgtagtagagaagtggtgatccaagcaggaagtgacatagcaaggagactcatatttaaagaaggagaaacaggaagggctctttttcctgttcgcctcctctgcgtcaggatgtgagccaccggcaaggagggatgccaataaggcatccgataagataagtcttataaaatatataggtttatgatagttaagactgagctaacagatgagaatcctagtcattggccaaacagctttgaacctaatacaagtttctgtgtatttatttgggccctaactcgggcaggcgctgatgtaaagttcacatgtggtggtggggctcaggtggcttttggcggaaagatttattgtaacaaccttggccttaagacatttacccaaactgaaggttttatttgttatggctgttgtggagttagtaaaaggtggccaaagtcagcctaaaggaaaatttaaaaaccagaagtctccatgtagggagatagagcgattggcaaagtactgacgttgtgaggacctgaatttgatcccggctgtgggataatctttttgtacaaaatgaagacaggctctacctaaggcaccttctgattggtttaataaagagctgaatggccaatagctaggcaggagagaattggcaggatttctggggagaaaaactctgggaaaaagagaggtagagagataccagagtgatgcaaagcaagttggggaggtacagaatgaaagagaggtaaacagctatgtggcggagtatagattaatagaagcaggttaattaagttataagagctacttaggaacaaggcagagctaaaggctaagctttcataattaatagtaagtctctgagtcatttttgtgagctggggccctaaggaaaatctgactacagatcccacacccatgtgtggtagcaaagtcttgtaatcccagggctggagcaaaagagatactggggatccctagagctcccctggatagcccagtctacttgttaagtcccaagtcaacacaaagcctgtctcagaatgaatgaaaataaataaatcaatgaacaaataaataaataaagtggacaagccattgtggtaaattgagtttcatagagacagcgctggggcaagcgagagccagacaaccactgagtgactctgtgcctcatagaggaaaatctactaagcacggtctgtcctgacctgcaggacgtcaacctggagagtcagggatagggaatggggacaagagatgcagaaagaatgaccacaagacaggattctgatcaaattgcaaactttatttttctcaggctagcttatatagtccatagagcaggatatggggaggggcagaatgggttgtttgtgcaccaggtgttggtataggcaggatattagaaagccatagagaggatgtttggcagggtaaagagttcatgagtaagaggtccaggaagggttgcctaggtgactgagcctgtgggtggaggactgggtcaggttgattcttttcttgagctgaggttctaaggagctgctatgtaaaggttaactatgtggcctgccaagcatagtctaggatctcatgccaagccctgagatttggctcccaacaacgggcaaaggagagctaggagtctgagaggcatatatcagtacaagcttggtggtaggagctagagaggaagctgggatgcttctgtcaacttcttgggggttctctgagaagtctttgagaggcagggactttttctgtgaaagaaaagggcaaatgtgaagacctggtcaaggctgacaaggctccttatgagagaccaataaacgtctacacccccaaaggggagaccaaagagatgaatgaacgtctacacccccaaaggagagaccaaagagacgaatgagcatctacatccccaaaggggagaccaaagagatgaatgaatgtctacacccccaaaggggagaccaaagagaatctcaaggacccagagcaccaaagaggcctccttcttgttctgtgctgagtgtcgcccccagatcaaaggaggccatcctggcttatccatctgtaatgctgccaagaaactgggagccatgtggaccaatgctgctgcagatgacaggcagccctgtgaaaagatggctgccaagctgaaggaaaaatacaaaaagggtattgctgcctgcagggaaaaaggagaatccgatgcagtgaaaaagggggtggtcaagctgaacagagcaagaaaaagaaggacaagggataagaaagaggaggaagaggaagtgggaagatgatgacaagtcaattctggtttttaacagggttttaacagggttttaacctcctatgcacagtcttatttttttattttttatttttttggtttttcaaaacagggtttctctgtcggttttggagatggtcctagacctctctctgtagaccaggctggcctcgaactcacagagatccacatgcctctgcctcccaagtgttggaattaaaggcatgtgccaccactgctggctacacaagtcattttaaggagaaataattgaaatgtcagatttttcttttttttatagttaacacactaccaactgtgtctttagatggctctgtccgggtggcattttcagtagccactgaccttgtacagcctgggggatataactggaatggaaattcaaagcaggttcttactggtgcacagaacaaattagttacatatgggctggcagtttttttgttttgtttatttttcatcttcagttgtctctaacgaagtttatacaaagataatggttgttctgttaactgaatgccactctgtaatagcaaataataataataataattgcatctgtttgttgacattctgaatgtttctaagtaaatacaattttttattaaaaataaaagtgaattgaactcaaacaatgatactcaaggtggacctctgacttcctcatgcacattcaaacacacacacacaaacacacacacgcgcacacacgcacacgcacagtacacacatgcacatacatacacccccacacactataaaaacatatacataaagattactttgagagaagccagaagcctctctctatgcctgcttcctaattaattgactggaggaggggaaatggcaggatccaggatgagacatgcaagggagaagaagtgactctgctgaagtccctgacttgtttttatcatttctcctgaccctcatcacgaggcaggacaccaccctcaccgcatgcttgctcccaagagcttacgatggatatcatgtaccatctcctagaattccaggttgtagttaaaggtctcaccataaaagacaaaatgcttgccatgcaagcctggggccagagtttgcatgccccaaacccaccaaaaagccaggcagacaggcggcacttgcctctaatcccaacactcgggacaaaagtggcggatctctgtgagtttgaggccagcatggtctacaaagcacaaagctacacagagaaactctgtcttggaaaaaaaaaaaaaaaaagccaggtagacatggtgatcacctgcaatccaagcactcagaagcacagacatgtgatgcccgaggcaagctagctggctagaccagcaggaatcagtaagctctggttgcagcaagagctcctccctcaacacataaagtggaaagcaactgtggaacacccatcatcaactttagccctccacgctcttgtatgacctcacacatgtgtacatacccacataggaacattatgcatcatatatacattcacatacaacacacacacagacacacacagagagagattccaagggtctcagagggagctttcctcctgcctcccacgtctgggctcctccacccgctccacccctgagctgtcctaagcagcagagtccttaccctgttcgctgccatctcctgcactgatgatgttgcccagagttctcctgtgtcacttcagtccctcttactgtcatctatggctctgtccccaggatcctcatcttaccacagatgtgaacttaggagcatggaaatgcagtctggtgggccacagcagtggtcctcctcacacggtgtttccctccacaaagccccctgtgcctccaccccttgtccttctcattcactgccctgtatttagctctgtgagaattatttaagatgctggctttaaggcagttaactatttccaccctaggggacagttggtaatgtcgagaagcaatttgggttgtcaccacttcaggggtgctgctggcatgtgctgggtagaggtcgggcgtctggcagtgtgtctgccacacgaaccccacagcagagactgaggcagctacaatgtcagtagggccactgtcaagaagccccagtatagagcaggatgggctaacttctgccactctccctgtgtcctctgctgtcacatcgagttggtcaggacatttgtcccctcaaagcactgttctgatcccagagcccttgccacacagggcgtcctcttctgagtggtgggtgctgaaatgcaaaatgaacttgactggctatcctcacattagatgctttgggtgttggctgtgtttacctgtataacactgcaaacgttcaggagagaagatcggatcacgtgtatgcaagctgatctccagtctctcagagacaaagaaggggaatgagagagaaagaggggaatgaaataaaagaagaaagactggacctagtatttgtagaaggaaaagagaaacaggagctagaaaagtaacattcaaagtaaggtgctatgggctggggagacagctccatcaacaaagccatgtgagcaacatacccaccccagtacacaagtctttgaaaactcggcacagcagtgcgctgcccataatcccagccctgaagaaacagagataggagtaaccctcaagctcactggccagtgagtccaagggaatctcactagctccggctcaatgagagatcttctctcaaaaacaatgaaatagtggtaaagaagacatccagtgttgaggtatgacatgtccgtgtacattcacatgctcactgagcaccccacacgcagatcataaatgcaccattacaattgagagccacccctcctgagctgaaggagccacccccagttcccctgcagtcagaagtgaactcttcaccacggtgcctagtcctctgtaaacattacagctgacccagcctcactgtgagaactccccagtttctcgaacttgctacccaatctaaacacagagcttcctggcaagggtagagaagagctaccctttggttgtcatcgttctcaaaggccacaccgagcatcctaaggggttccttccctatagtttgctggccacatcgtctggggcctgcagattcaaacaagcatttaccctagttaacactgcaacaaatggccaacaacaggggcatttagctaaagcaagatcccaaatgatgcctctcgctgatagcatcttgatggataaaaactgtgtgtttttatagctcagatcttagaagagattttggcaggcccttagtatttcagggtctgtgccattggaatgacacagacacatgtctgttttttatttttccctaagaaatgtaagagtgttagcaaaaattcgcgtacgcaaaagacatgcgttggaaaacagcaagccttcctattgagctatcaaaatgatcaatttgttggagaaaaactctctttgaaggaggcacatattattctggtactgtgcaggttgggaggttgtatttttttcctcctacagcactgccaaccacaagcccaagtacagcctgtgtctcagatacaggcacgcatctctctctctaccagctgaacttgcactgtcgaagggacacattgttttcttagtgtggcttcctgcgctcagctcccacagtgaccagactcgcaacctggttccactgaaatcatttttttcctttgacatattcctattctcagagtccatctgttaattcttttcatcggtggcatatttgtgacccatgcaaatttccacaagccgacttcgtctgctatagaatgcaatggtgtctacctctcccattcaagggagctgtctggatgcgatcccaggcccgggagagagaagatggaggaaagagagggagaggctgtattctcacgtagccctctttcttggtttctaccaccttctctatagggcggggataaaggagccatcagcagcatcacgtgctcattctctggacattcgaatgggttttgctaaaaccaggccagggcaacatgtgaataaccacaacacattctgagaaaatccccacaaagaagtcatggagacaccacgctcttcacccaagatccagtgagctcaatgcagcttgtcttgtgtccctttaagttccaggtgcccaggtctgttggggctatgaaggctctctgtgccctatgaccacaaagccaaggcaccttctgttacctttgctcctgcggggagagttgctctcatgttttcactcggctcaacagctcagggcttgctgactcctcgagttttcagatgatatatcaatgaggcatttaaacagagcgttcatacacagaaattctgtctgctttgtaaaagattatccttttataaacattctgcagaaaacataaaagcaaacaaggaacagcacataggacaggaaagatgttagcggggagattaatactgaatgggctgaaatgaatggtcccactaaaaccaggtccagatactttggctgcagtgaaacataaataatgggaatgacacatcatttattcgggataatgagttgatccaaagtgaaggcctcggtcgagagattaaagattacatatccatctcctgatgagtatcagtagccaactttaaccttttccttacaaaagtacaattttatttgaataattttgtgtgccacattaaagcacagtccttaaaatccacagggaagtccacttgaaccactatcttagctggcagaaaacaccatttctccatcaaggtagggggtgggacctatttgtacgctacagcctctaaaatctgaagcttaataaaaatagattttgctctcattgtaccacatttgaaaagtcaagtgttgcaatttcttcagaattgaagcagtccctacttgaagaagtctcattaagactcaggaaataaacagaaactatcatttaggtttaggaagtaaacaattcacaagtttcaggaagttcctaaaacttacacaattcacaagccctgccccctaccctgtcaccactgctggtgggtggaggctgctgagctgcctgtaagctgtgcagggagccccaggggcccagcttttgtgagtcatctcccatgctggagtgggatttcagtgacgccactgtgtgtgattcccccatgatcctgtaaattaactcagtaaactccctcatttcactaagctagatctgggaagagttctttcttccatctatcctagattccttatctggggtgaatagacatttgtgcatgtctccccaagaaaagtctcataacatccacctcagggattttcctcatatctcctccttcatctgttaatcaataaagtttctcaaaagaaacagagaagcaagggtgtcgcttcctaatatcacaaatccacggaggcgaaaggagccgagcaatgggaatcctgtgcaatcttcaccccgctggtgaggacactggggcagagtgccatcaggagctggagcagagctgagaagggccctgcagcctcttgctataaccctgacttgttcctttgcccctgctgcctctttaccattaagttgtaaatgatgaccaaggcaggtccctggaaaatccagcacacacatctgaaattaaaggcctggattcgtggaaagactgagacgaccaaccaaacgctttaggtgaggaagtttggaaataaggagggagtgagaagagttggagcagcagggagaatgtaaaaaagatgtaatggggataagctgtgggtaccaatacagtaggttcttgacgaggaccaaacgaagtgatacaaacacacaacagatgcagatatccaggtcaccagcacagcctgacgtcaccacaggtgagttacacagccactcacccacagagagcaaggtcagcatctggctggtatcccacatgacactggtttagggggtttagtctcatgtagctccatggctagcccatgtgattgcaccacagacagactttgtcatcctgtcccctgccctgattcccatcccaacctgtcccccccacccagggatgaggaactggacaagggaatccttttttactttgcaaatatttgcatgataatgcccatggcctttcatgctctttggagagagagaagaatttgtgcttgagagagagagagagagagagagagagagagagagagagagagaggtcccagacttctcagccacaccatggtggtagaataaggatgcccacccactccatcctgtcctcttagtaagtcaagtaaagttgattggtttcccaggggcaaaaatagttgaatcacttcctagataagaaaggtgttactggaaatagccacctccttaacatattgaaaaaagttactagtgtgtaacttgagtttgcactcaggtggaagaggagagcacaacatgcaactgctatttgtgaacagaagagacaggtcaccaggaagctgcaaagggagctatggaaaggaaggccagtgttccctcaaagctttttaattatttgagtattaaggacccaaggaaaaaatagaaccattcaactccttaattataaaggtgcatcccaactgcttttttatatttttttaatcaagaggcatcagatgaccaggtgtaaataattctgaaaacagaagacagaccctatggagggtaggaggagcagacagtggtagaactctacagaaaatacaccctatttcatcacacctttcctgatctcaaacaatgctgtggcagggcaagacagtacagaggttccaccatcttgtattcgtgctgaggccatttcaggtctaaccagatggctggcatgtataagaactacagctgccatagctgtgctgattaaagaggctgacaaattaactttagagcactaatggtttctgacaaccccactgtctgtggaggccctcttgagggggcagccagagatggatatgacacaggggtgacccaatatcaagccttgcttctagatcaactcttcactgagttccacaagacatcagccctcaaccctgccagtcccctgcagatgactgacctgataacggtctatcatgtctgatctgactgatgtcccattggtgacgctagagaacttggcttctgttaaactgcctgcttgtgcaaatctccccctccatctaactgcttatcttagcttctgttaagctgcttgcttgcacaaaactttccccaaagctgctgagtgagatactgggatgtgattttcacctcaagaacatcccttaccctaaacacttgatactacacttgggtcccaaatacatgagtatagttccagccaactggaacaacaactttcaattgtctattgactgtgtctgtgttgacatggcgtcagagtgagaaagatacaatggcacagccttgggatctttctacaaaaaaaattccagttaaactctacaaccccattctttccagatgtttcccttttcccattgtgaccagaacccacctggctgtgaagagtctgcaatctacaaactgagataactgtgtcttatctccccagagtctagattggtggtcctgggtactacaagaaagcaggctgagcaagtcatgatgagcaaaccagtaagcagcaaagcagcaaagcagcaacccactgtggcttctgcttcagttcctcccttgagttcctgctcagaattctctcagtgatagagtataacctgcaagttatatgctgagataatccctttcctctacaagttgcttttggccatagtgttctgtccagcagtggaaaccccaacttagacagaagatgcacaacagggtaaatgacatgaagcaggcatgctggggtgtgaaggtctctctccatgcttttcctccacttagagataacaccagtcttcatggcttctttcatagctccggaagacacaccatggcctcttaagccaacctgaatcagatcctgcttgccacatcttcttagaattttcttctcacctttcagagttattgtcacagtttgtaattgtttgtgtatttgtctgattgatatctcactcccattagagcacaaactctctaagaacaggttctcaccattttgctcactactctcttttcagcatgtgatacatggttaatgactgttagaaattcattaaggggctggggagatgacacagtgagttagagcatctgctgtcacgtagaacaacctgagtcacatcacaaggacctacatagtggaaggagagaactaattaaagcctgtgaaatgtcctctgaactccacatgcacacacaaataagtaagtcataaattaataaataaaaaagttttaaagattaaagactcattaaggaaagtcatgaatgaatggatggatgaatgaatgaattttagtgtacatccaccaaattccagataatagcctgagaaaccagatgaggttctagctctagcagaggaaacgaccaaggccagcaaagaacttttggagcctgaatgaaaagggtcacacacagttcatctgtctgcagcccctgtgagagaattgaacgaatgaaggaggtcatgctaaatgagtttgtaggtgcacttttgattccaggtttccgtagccaatgtcagacctagaccacgtatttgagaggtttgtggaaatcctgatacagtaccggggttcactagtactgcctgaggaaccggtcagaaaacaagaaggcaaacagcctcaggggccacagcagagcacagcatatatactgaccagtatttgaaccagaaaaaaattgctatattctgcaagaaagagaagatcgaaattgaaaaacataggctcctcctccccaagtgttctagggtgttcccactacccactgtccctactctggggacagcctcttttgtaatattcacatctgcctttgtttttatatatcatttgagtaaatctagaaaagcacatataaaatgtgaagaaatggctcagcagttaaaagtaccggctgctcctacaagggacctgaatttggttgggggggggggcacggggatgggactacctgtaactacaggggcatctgatgttctttgtctggacttggcagacatctcactcacacatgtgcacacacacacacacacacatacacacacacacacacacacacacacacacacacacacacacgcacgcacgcacgcacgtatgcatacatgaaaatatgaataattttaaacaaaagcatgtatttgttttgcactgttccctctgatctgcttgcatctgtttcagaccctagcgacgacgatgacgacaaaagttattggtgctaaatgctatttttcagggccgaaaaacaagctgatcctctcagcacagtctcacagccgcacattctcttgccatgaaaaaaacctcctgtcatgaaaaggtaatggccgatgaaagacagctttgcaaatttacagattccaagatctgagataatacttaaaaagagtgaacctgagaccctgaccttcagccaaaatctggaccataagggacggcagtggctcctaaggccgggattcccgaactggggatttcggttattatgttccttggtatcacggaacaaagtcagataccttccccaagaaaggggtggcttcggccacgcctcctgcctggttagttttaggccttcagggtggtcttatactttgtaaagtggcatttttgcgaggtgattttccaaagcaggtgtgcagccgttttactgcgttgagccaaagtgtgatttttttagtactgagccttcttagagtttgttgagtttcttgaatctgtaccttgacctcttttcatcagctttagaaagaattcaacagtcatcttttcaaatatctcactttccttgtctctcgctatggcggtttgaatataaatggcccgcataggcccatagggaggaagtctattaggaggtgtgaccttgttggggtgggtgtggccttctgggggtgggggcgggctttgcggtctcagttgctcaaaagccaggcccaaagtctgtctcttcttgctgtttgtaagttcaggtgtagagctctcagctacttctccagcacaatgtctgtctgggcatcacctctgaaactgtaaacaagccccaagtaaatgttttcctttaaaggggttgctgtggtcacagtgtctcttcataacaacagaacagtgactaagacactcccctatcctctgaacttctacccacacatatgttgacttataccccatatgttcctttttctccattcaatcttccaattttccttttcttaggttaatttttacttatgtgtgtgcctgcttgtctgtgtgtacactgcaagcatgcaggaccggtaaggggcagaagggggagccggagtctttggaactggagttacaggtcgttgggagccctagatgtcagcactaggaactgaattctggtcttctgcaagaacagcaagtgctcttaatcgctgagccatctctccagcccctccataaaatatttgtttattatttattgatttgttatgtgtgtggaggggtgataatatggtatgtgcagaggtctgaagacaacctgtgggaatcagttctctctttctacaatgtgggtcccaggaatcaaacacaggccagcagccttggtggtaggtaggcatctttactcactgagccatctttctagccctcaagtttctatttctttctgtgactcagtatggcactcttctgtgaggcaatctttgagtatattcacactgtcttctgcttcccatgaagtcggaggaaggatttttgttcatctcaatttagtttgaaatcaaggaaacttggtggaactaacaaaatgcattttggttagattccatttgcctcccttttgaattctgaatgtttgttgtgggaactcccatctagatgatttcccaagcactttgaggccgtgagacattttgatcttcttttccagactgccttctcagcctcagcctccatcacacctcattcctctacaaaagtcctttgaggtaattggactgggtttctaggacacatctggccaggttcctctgcaggattgtctttctccagtaaagtccctcagtctaagccaagtctgactgatccatgtttacaattgtatccaggaaagataatgaccagtggtcttggcttgtgcatgaaaaggttttcctctggagttttaatttatctaacagttttctttctccttcagcatctttatgaataaaatgtttggccagtgtagtaaactatgtctatggtataacaaaggcacaaatgttataggagtaaccaaccactttccacttggagttaaggcccatccacaatgccaagagcccatggctggagagttcagagaccccaggggtgggggttgaatcttctattacaattttgctaaatagatatagaatcaaactgttctcttaacttttatcttcatacccataatctagtgcaaccctcagacctcatcagaagattttgtgcactggagggtggttaatgcagaaactgacaactagtcaaagcacggagaacaaacacctgtggcatgctcagccgcaagagtgacattgacatttctatcacccatccccaacaagggtcaaggaccatcaagaaagagggggatggaaagattataagagccagaggctggggaagggtagagcaggacactgggctcatgaactcagagtagctgtgactgcgtgcaccagaccaagccagtcaacaatgcagaatggggtggggaggggctcaagatctgcccccaccatagctgaggagctgttgacaatgggtgggtgctagtggaagaaatgaagatgctgcccctggaaggctggccgtgctagtggatggccacatgctcacgacgacgatataggaagcacagattggattcagtgacttgctaaaaagaaaaaaggatcttggacccactgccagggacctcatgtattgtccaagtcacaccattgtcatctatattgagagagtctagtgaggtcttacacaggttccccatttgtcagacctgagtcaggtaggaactggaagttggtggtggctttcactttgtagccctgtacatctctcctgttatttaaaaaaataaataaaaacagcctcctcttgctggtcacactgtcctactcatagccccgaagttcccggagccctgaggctgtcctgggttttctctgtagtgtcatcttccagtctgcatttctgccattaacgccctcatctccttttcaatattaggggcctgaattcacatttctgagggaagtatagccagcccactgtaagcagaagcccaaacaaccacagctggcaagtcttctgcaggaatctatctgacctgggagtgctcaatgtgtggactacagattctgtatgaggatcattttccaaattctgtgactccgtgtctttccctggactgtccttagcaggagtctaccaggatgccctgtagccttacccaccctgcgtcatgggatcctctaaaaggggtgcatcacagacaagattggtctcacatccccacgctgtggtctatcaatggatcctgtgtgagctgctaagtcctctaagtttgggttttcctcatctgtaaaacaagactccttgaagggaaaaggggacttagaaagagactatctcaggggggaaaaaaagaaagaaagaaaaaggactcctccccctctgagacaaggctatggaatcaccttcacccagagaagacattagaataatagtgcatggatagaaccaggccaaccccaggaaataaacgaccagagctgccagcaaaagcccttgtttttttcccccctgccaagtctggttttcccagagatacagtgtgtctttggataagtccacaactgctccatccagataaagtctctcaggcaggcagcatgtttatagtcaaatgcccactttacttcaagtttccagtcccctgctggtccttgctacaaactgaattaattagctgtggtgaacatttgttcaacttcatgcagcaatgggaaaccaaagaagacaggctctcataaattaaaacatttcaaaatattgtcttctcccaagaaaacagtccttttttttgtttgttttaaattaacactccatttggataactttaaggtctcaaaagaaaacaaacaaggaagctccgaaggaggctgtttgcttttaactgtttccccccattgtcctacgtcatggttcctcctgtcctcagccttgtcagccccttagacgatatagcacagatcctccacccacctcctcgagatgctcaggcaagcataccatgaagctctggcgtcaaaatgcttgccatgcttcaggatcgggcaggaaaaggagatgggtatctacagtgacaccaagctgtccagggccattgcacacaggaaccaatggtggctgtgactaaatgcatgagatctaagcaagatcaagccagacagcatcctagcatgggtggcggaagaagtttgaatttccactcctggctggatagccattggcaactgaagactgctgtatgcccacacacatgcacacaaacacaataaataaatgttatgcaattaaaagtaactggcctgtcacaattatatacaaatagtagcaacggccacttatggaaaggaatctccacttgcatttaaccataatggccatggtaattaatgtaatggctgatgtattaggttaggtctacttcaattgttacctttggccaattgtaacaatgagctattgtgagtatccaaatgtacatctttattcaagtatagagacacgccatttctgtgtgtctacagccacatagggacagagagatagtacaagtctttccgcttccacctctctctctctctacatagaattcataatatatatgtgatatctatgtcaaaatagaaacaaatttaaatttagagtcagccttctgtaaccacagatcctagatctgtgaatttagtcaattatggattgagattattgcagaaaaatgtctgtatatgtataggcagttttctgtccattattaaccatatgcagtatgccaactacttacatagtgttcatgtggtattagatagtacaagcaatttccagcactctggagtctgaggcagaaggattgctgcaagttcaagaccagccagggatacataataattcctaaaccagtcagggcttcagtgtgagatttttgtctcaaaaacaaaaaatactctaaggatgaattgtatagggggctatctatagttaaataacatcattttatgatgggtatcctactcagagcttggcattgtgtgttgttctagaacaaatttctacaggaattgtatatacatacacatataagcacatgtacacatatatgatatttacatatatctgtatatagaggcatgcattgcaaatatatatcatatcatagagacaaacaagtgagcaaaaagaaaactagttcccaacagctctttcctgagcagcacatattttgttgggaatagctatgtaatggactaaaccattattttcagcatcacttacaaatagcaggggctgtctacagcacggctgaaacacagggtttgcagaagttatgggatggggaacccaaggacgcacgccacagcaagcctaggcaatcctagcttgccttgctgctcctcagtgtctgtagcagagatgctatcactgaagaggatcggttggcttgtgacagtgacactaacatggctaaggctaaaccaaagtgtgaagagagaggcccattctctcgtcttaccaaaacatgatgctcagctttggatagctcactccaaacttctcatgagaaaaaataaaaaccctcttttgaaatccactgtttacggactttgttttgagcagtcaaatattagtcttaattggtgcaagaagaacattgatccttaccctccaggcgtgtgtatccgctgacagaacaaggaagtcatttgtgtttgacctggttaaacagcatggacttgtgtatgatttgcttatacagatgatcaatctgcaatgcttgagagcttgaaaaagagagatgggtcagtgactagagtctttgcaaaacattttgagggcatgaggagctaagctggtcctaaagtagagagaggtgtttgtaactagaaatcaaggaagcaggtttgaggaaaaaaagacaaagtcacagcaagaacacaggcacaaaatcagaacactgtgcactgactggctgaggcaggaagagggccacaaaccatatggaagttgaatcagggttaggattagagactgggtaagagaagactcgagagtcgggatttggacctgcagaaggtctggccctgtccatcatcagccactcagaccttctcttattccttggctactactccatagtttcatgtttccaattagcattaaccattagacaacacattcaatcccagtttgtggtagttgattgtgactgccaacctgactggactgagaagtgcctggagattagtgaagcatacttctgggtgtgtctgtggctcactgagggggacggtcctgctctgagtgtgagggacatagattgcagaccatggtagaaagaaaagaggggagagagagccgttgaggacagatgttttccctctgcctctttgccgctgtgaggtgagaggcctctgtgcagcaggtctggtaggatgttgtctagtctctagtagagcaaatccaatcatattcaatggaacacatattcaagaagcatgttttcaattaaaactgtgacaaatttatctgatgctgtatgttaggtcatcaaaatgtcaacaaatacttactgataattttattacaaggctgattgaggttcccaggtgatgagtctgtgaacacataccttgcggagactgatcacccatcttccatgctcgtaatactgatcatgccatgaaggttttagaggctccaaaccaagatggtttatatgaatcacggaaactaaaggaaatctcattggcatgtagactttattatggtttaatgactactgattgtaggtcagttaaatcacatgaatagataactttaccttggactgccagacaattacctgtatcattgttcaaaaggcatcaattatgtctattcctttttaaatttattttattattttatgggtaagggtcttttgcctgaatgcatgtctgtgccacatgtttgtgaagtgccatggacgcagagggtgttggttcttctggaactaaaattacagacagttgtgagccaacatgtgggtgctggaaatcaaaccctggtcctctggaagaacaaccagtgctcttaacctctgagtgctctcttcaaccactgctattaaatcttgagggaaatagaaatgtataggatggagccagctgtgcccacacagaatgcctaatgaactctgaaagctcaaattgtccctttcgtttaccgcacccactcagcactgcaggagatgcccactctgagtcaaaggatgcagttccattagaagatggaaacagagtctctacctaaggatgaggaattgtacccacggagaaatcatctatagtcctcatacaaaaactggtctctttgatagtctcacccaaacatggcaatcagtgcacatacaaccttagggatatgtcctcactaagccaactacactgcatggctttgttttaacaggtcagagtatacataagagaaaactctggataatgtgtttttaaaattttcctttcatcttgacatcactaaatgattgggagtgctctccattcagttccttaatgacaatatccttttctcttacaaatgcctttgaagtctcctaccgcctattacaagtatttggacactccccagcaagagtgggcagggggccaacacaagccaccaggtgccaatattacacctgacaaatgggccacacgactggaaaagggtgggcccatcctcgtctcagcttcatttcctcttcttttcccacgaacaggaagtcattgttggaatggagaggaagctttccttaaaaacccagatgaccaaaggtctgagctagttaactccctgctaccaaacaaccaagaggtgagagcgagaggcggcttcacacaaactcaaggctttgtttgcattgacttctttcaccctgctgactcgtggattgaaggatgctgtgattaatttggcacacagagctcgtggggcagatgagataccttgaatgcctcagaacagttgacgagggtgaggcaaggggaggggagagcctatcttctggagtccttgtataaatcaagagaatctgaagggtgaaagtctgtgagaagcaaggctggaaccataaggtcagatcagaacctactgactgaaaaaatctcatcagaatcaactgagattctaaaactcaggaagaacaaccacagcacactggcaagtgctcgctgcagctaaatgcctaagctgcttcctaaagatgccgctcgctcggcttggttagggtccaaccaagcacagtaagaagaagttttactgtagaaaagatatgtatttactcctatcttaatgctctctcaagaggcaccaactgggccacacatctgtaatatacatcaatgattaaaattcatcttgtatatgcatgcactcttcaaaaaccattaccccaaagaggacatagagttgggaggaggtgggttgaggtgggagggtggatccaggaggcgttcagtagggaggggggggtatgatcaaaacgcattgtatgcatgtatggaattctaagataatccctaaaaatattataatttaaaaaaattttaaactattacaaaaattatataatatggaatgttctggaactttccttttttttttctagcaacacaactgatgtctgtccttggtagtctagacaccggtactttcatgaactgatatatccagccaactcctaatggaggaaatggcagcccttcttttaccattaacatggctaaaccaattattcagaggtcccctagtcacacacatttcttctgagaatgactcattttatgttttgctcatttgtccacatacctcccatgcactctttcagtgatggatccaaacctttttctgaagtgtataattcaaaccttttgtcccaatttgtcacttctataaattgtctaatgatgtttttaatgaagtcatgtcagtcaagttttctttactgacctctggctttgcctcttgcttgcaaaggacttctaactcaagattacatgtctaaaggtttgtgcattttcttttcgtacttacatagatctgagttttgatccatctgggatttacttctgtgtataatttgagtccagatggagaaacagttgccccggcaccactcacagaacagtctactattgagctactgatcagaaaagcctccaaagcatccacactcactgtgacattcctctgtagtcctgggtctgcttctggactctaatcacggttaactgatttctctgtcatttgctgtgcacactgcatagtttaggatgtgcagtttgtttggacaactactaggatgtgtctgggcttaaacaaaagaaactggtttttgctgttctttcatgtgaactttataatggattgatccagttcaccaaaatgtcttgttggaaacgggatggcattttagtttatgggaaagtcaaatgagttttttacatcttgtaagcatctgattaaagcacaattcacatttcataaaataaagtaccatatatacatatgtatatacatatatgtatatatatatatatatatgctttattaattcacataagtgaccgtggggctcctattgccaaatggatgtctatagcttaactcctacactcagggctcaggaaacattgtagaatagagggcagaaagactgtagaagccagatgctgaaagaactactgccaagtaggatcttctccaagcatgactgggatgctgcacccatgaactctcaacaatatggctgcctacataagtaggcactagtagacaggccaacatgaataagccaaccattttagaatgatctaaaattcttagctccacccttagttgaagagctactgagggagagagagtttgttttctccagagacaaatcccccattaggttgcccaagactgattatatattgacaatattaattggactcaatagggtgcgcgcgcgcgtgtgtgtgtgtgtgtgtgtgtgtgtgtgtgtgtgtgtgtgtgtgtgatcacagaagtgatgacatggatttgaaggggggatgtggaaaggaagggacactggaagaattggagtatggagcaagaggtgtagaggtgaagcaaacacagtatattcacatgtaaaatctctcaaaaaataatgattctaattgaaccaggcatgatggtgcatgcctttaatctcagcactcaggaggcacaagcaggcaaatctctctgagtttaaggccagccaagcctacataataaggttatcactcaaaaaacaagtatgtactgtgtcttagggagcaagtatacagcgttccctttgatgtgcaacttagtgacccaaacagcctcttctgtggtgtgcatgtcacagcgttagggacggacacagcctggccctggccctcagaggcttgaaacctagtgaagaatatgaaccaagcatgtgggcacgtcaaacacatggatgcacaagcgttggggtagtgtagctaatactgagagtcagatgagctgctgtaaactacaaaagccctacgcagtcaaggtcaggagattggggaaagacttccaggtgttttctctcattttacagcaaaggatgcagaggccctgaaaggccgggtctgggactgagcagccacagaaggcatgggtgaacagtctggtttagcacccagctgcctctccttcacacaatccacttgtcaaccattttagagtgagctaaaattctcaattaatgtgtgcagtgagagtcctttagaaaactcacacttataattttcagaactcagtaatgtgtcccccaaatcagttaaaactgaaaaagccacagtcaaatgactctattacatacatctgttttgatctctgtgacatcaaatgccaggtgctaaagacacaacactcttcagccaatggttttgacaggaaaacacattgtgcctgacttggtggtaactcggaagagacctttttaccccttcaggtgattcattcccttgtcatattttagagcccccgagttaaaataaaacaccctaagaccccccaggaacctacactcctgtggagaggggatttctaaggcccagcatcaaatcacctttgatttttctcttgagtttatttttgtcaccgtgaagcaggtaacacatttcagcttttaagccatgaagtgatctttcttttttagggaaaaaatagctctcacagctttaatcttatatttccatgcgtattgagttaaatgttgtaaaactatcaattctgtcaaaacctggcaaagagaaaacaagacaccatacaatcttaatgtccaaactgactggtgattatcggggattaaatgtgcaggaattccaaatcttttttgatttgagatgtctagataacttttgtttttccataattgtatgaggtttctacatagtatttaagaatcaattatattgcaattgatgtaattaactctaataatccattaaaagtcggtaggagggctattcaagtcaacagaaaagaaggagcagattatgaaggtgttattaacctatacagaattttaccagacattttcttttcttacataataaatacacagtgttaggaaggctgtcattataatttagtatgaacaatagtccatcacttcttttcctatacaacccttaactaattccatgcaccatgcacaagtaaaatgaggccctttctaatcagggtgcagtcgtatcaatcatctattactccatgatgaatgatggggtccctgctcaactaagtggaagagaagtgtggcccagcagaaacaccaagcccactttctctttgaattgacaactttctgtttctgatgcctgtctgcatttacccagcaatcaaagagaaagtttgagagaagagaaagccccccgcttacacttgatgagcacgaacttgctgggaaaagcaaggccacgtgtcctgtggaacaccgagccagttgtgcagcctactgctctctccagccaagtgaagtccacactacccattcccagagcctcccactcttacaccctcccagctcaagctatgaaccagacagacacctcaaacagccgaccctggctgctcttcacacactgggtatgttttgaggctacagcatgattccctcaagttgccattattcctgggaaaacttgatgggaaaagaaatcaggagttcagggctttagaatataggtcacggctgagcctgggggtgcagcaatcccagggactcagaaggcagaggcaggagaacagcaagttctccccgggctacctaaccattttaaggccagctagggtttgtaatttagcaagatcttatgtcaaaatattaaaaaataaaattaaataaggagcttaagatgtaggtaactactagaaaaactgcctaacaagtgcaagtctctaaattcaatccccagtgcctcaaaaacaatcaattaacttattaattaattaattaattaacttattcactagctgcaggccaataatcagactgtccgtctctcaatgggttcccgccatgagccatttccagtttgaaaatgaacaaaaatgttgcctctaaatttcctgtgtctgcatgaaaggacaagttgttggtgacctcagccactacccgaccatcagattccctgggaacacagactgctacggcttcatagctttgtgtaggggtcacaaagggcagctgtacctggcaaagatgcagagctgtggggcgtacggtagggaggacatgcacctggacaaaagtgtcggggactcggggtgtgagccaaggaccatcattcctttgcaaactggtcggggaagaccctgaatctgagccctggcttcagcgagttgcaccccacttaggactaaatcaaagagagatgtgaaatgagctctgtaaagcataaacccttcatggccccaagagtttgtttgtacatggagcactgaccaaagtcacacgagttttcaaagtcaggaaagagcgataaaacacagttcctcaaaccttgccgtacgaggggtcatctgggaagttatttcaaagtacccaatccatttcccaggatggcggggggggggggtcatctctgatgggaactccaggctgcgagatacttggataagagtaagagtttggctggaaatagattcccatccgttcaccagatatttgaaacactcatgagcctcagaggatagaaacaatgacaagatatggctcagactctgagcaacttacatgtggagggaagataaaatgaaagctgtatgctgaagcaagacccacaagcccacagccacaatctttctggtgtccctttggagctagaaccagacaagacttcactctccccagagagaaactctggttcctatcacttagggttaaagtacctgtgtgagtgcctctgtcgctgaagtgtgagctgccgtatgcctgtgccctgagggccaatgtgggtcataggagtctgggtcaggcatcaggagagagtgtggcccctgtccctgtctgaagaaagcagacaccttggatagctcagctcagacatggaaggaatggagatggagacccctgttctttccagagagcatctggtttaagcggcacccaagaagcctgaaggggacaactccagatgtgggcagctgtgtgagaagaacagaagatttgcctctgaaggtttcactttgagcctcctccccaaggccaagccccaagagcccatctggagccacagcagtatcgggagcagacggggaatgccaccttcccttctttctgaaagcgcagggtccctttgtatgggtcccaggaacaccgacaaaagaggcctggcccaagagtcaggaagcctggcctgtcattctgcctctgccagtaatgagctacaaatccatgtgtctttctgtgtcacatccgtttccaaagaggaatactcaggactgtcaccctccctagctgcttcacagggtgacatgagggctacacagaaacctttgaaagggtagaaagggacctctgaaaccaagaaacggatgtgacacctctgagtaaaatgttgacctctggattacgccacctgaccatgagccctgtcccccagttcaccagagaacgttctatctgctgctttgctttgaaaacgagggctggtctcctgataagtcaccaccacggtgtcctttgcagataaagacttgtagacgaggttgcagtgctgcctgaatcccctccagctttggcagatttgaactctctctccaggcctacagaagctaaaaatgttgttgctttgccccccaagcctcagcctgctcacacagatctggaggtacccaagtcatctgacccccaaccccattcatgtgacaactttgttcaccgctaaattcacttgagaggggaaaaaaatacctcaaccaggaaatatatcttacacagctatttcatcctcccctcacgtggtgctggaatatcgctttaaagaacattcttgtggtgtttccagttctttccctttggtcctgccacgggaggagctggtctgaggggaaactgctccccagcagagccgttcttcaaagggacttcttcaggcaggaagagggaatgtctgatatggtggctgaataaacagactcgtcaagctcagagccagtttggaaagccaggccctctgagtccgaatctgccagccctgcacagcgcattgctacggctctatccgtaatgtcctgtctctctcttctctcccactccatagcaccaaatgccttagcacagccgagcgtgggactattcctttctttactgtttatgggccagcctaagttaatagattctgcacgtctcaaagcccatgatgtcacccatgcaatcacaatgtcttgcaatgtctaccacggtccatagtcatcaaccttctcccatgactgtgaagggagaatcacgggagaatcagcggtacagcaatgcacacatgagctcaagactattctatgctacagagtgacttctaagccagcttgactgtataggaagactcttaaaactgagaagatcatataagtggctcataacacacagtgtgccagccccggggcagatcactgattgaatcctaagctttacagggttccaaagaattcattttcagaaacaaacaagcaaacaacaaaatctacaaacccacacacgcagaaaggtaattgtctcctcagtcccttgaactggtccaactcttgcaatctatcatagaattactcaaacgtaaagaacctacacattttatgaccattagtttttccattgacaagctgctcatgagcaaaattccaagccccaggtcagagcagggcttaggcttagagaccggaatttgtcttttctgtactggaaaatttggggttttcttttaacatgaaataagcaccgaaaggtgtggctattcagaaaacacggatattaactcgtttcttttgccagtgtgtattcacatatattctctggacactaatgctctatgaatttcccatctcaaaatttcaggcccattagaatttgtttctacaattccaaaatgtgtgcttggtctaaatatcccaatatttatttagtatatttccttgtggaaaatatcctgaaagacccgcattcttgggagggttcagaaaactctccaagacctagtttcaaatgaaagttcatttcttcaagttaattcattccttccacaattggcttttggtggctgtgttattctacttcctggttggccccttgccctgttctagcagaaattatagccaaggagaaagtcatacccatatctggataatatagatgtctgagatccagtgcagttttaattttctcccaacagtgggcatttaagtaatcattaagccctccctcccactctgccatcaacagcattgctacctccccaaggaccaactgggaccgtgaatggcggttcctggctgtaatccctcaggagggacactgagaaaggaggtttgctgtgagttcaagaccagcctgggctagagaaagactgtctcaagtaaagtaaaaactaaaataggcaataaaagactacttgggatccttactttgatcaacattttcagagtgtttattagtatttgtgagtatgtattgtagagaaatcacgagagtcattctgctgtgttctctttcacgaacctagactaacacccaagcatgcacaaaccagtacacacactctaccatttcacaaagctattttgtgtctattcttggagagagaaaaaaatcctaactcagctacatgggtactaactgacaaatttcaagatatttagacgatatcaacaaacagatttttcattttttttactgatttctgtataggtagcatcatcaatttctggtcaaactaagaatgaaggtcagagactatttgtatcagtctctctcagatgtactcctctccacccagcatggatcaggctctccttgtgcaaccatgggcacaaacatctcttaggcaccgagagagggacaaggtgggaggcattggattttactcacctttggcccagctttatttgttctacagataaaataactttggacttctttatccaaccagtcaccttgcatcagcagtaaactccctcaaaactttctgttcccgtcagacccttgagaaaacaaaacgaaaaaaataaaagcatgattaaaatctactttctttggtcaacatcctagcattgagcaatttcttgacatctaaaagggactgtcctggagtctgactgagagtgaactctttattgatcaaatggctggggccagaaacaaccagagaaagaaagttgagtttgcaggccctattctaggtcatttcccaccctctgcatcattaggacttcatcctcagtttccttttgaaaatagggatctttgaacacttaaaccatacacttctaccaacaataaaacattaaatttattttaatttacagattacatacttattaacctattctgaacatagagaacacaggaaccactctcatctgaaggttacactgacatccactccaggtgaagaagcagagtcttctgtaacatggcccttccatgaccaataaaggcctaaataactctcccaggagactccagggctctgtagctttatgttgagggattaactaaagagttccacagtacaaagaggaaagtatttcttttctttttctttctttttttttggctcaaataatgacaagtgtctgcatatttggagatttatgtctgccacgaatatatgtaaaaactttcatagagcataagatgagcaattacctgattttcatctttgtaaacacaagttggggatcttttataacaacaggttccttaggcacatgtatatattcaattcaccaaattgtttcaagaccatctatttgactttgaccagaaaaacaaaggaaaggagagagaatggatcaggaattgaggagctccttcaaaagtatatatgcataactctgtatgtatacatatgcatcacatacatgtatttgtatgtgaatagaagtcgctgccacagaattcatctgggcaaaccaagtacctttgaaacactatgacgtgatataccaactgacagtgaaaaacacaagggcacacacagcaaggactggagagattgctcagcagttaagagcatgtattgctcttacagagttcacttaaagtggccaacaactgcctataactccagctccagggggatcctgcattcgtgtgcacatacccccccccacacacacacacatacgtgcacaattaaaagcaaaataaatagggactgaggagatggttcagtggttaggagaatttattgttctcccggaggacccacgtttggttttcagcactcccatggtggtggctcacaactctctgtaactccagttccaaggatctgatgccctcttgtggtctctacaagttatagccatgcagtggtggatacacatacattcttgctcacaaaatactcatacacataaaataaaagaaatacatttttaattaaacatttttaaatcgcaaataagcttgtgctagcagagtaaagaattgtatatagctaaagtcagattatttttcagataaacaaagctgtatttaaaatggaaggacttctcactggcaaaccatatccaggcacacagcgttcacagacctgaggaagcgactggtcgtaaggcacatccatgaagctcacgttagtggattcacggaagacacttggtgagatgggtcagaattcagtcttgcttgaaacatcctggcaaacagcaaatcccaatgttgttgcccacttcaagcccccccaatgtgctttcatgctacgggagacagcatgtaagaggcacaggactgacatgggatccgggaattctacctctcctgcagcttttcaggcattgacctttgtttctgaaatgtcaaggcatctcttatgtcatcaggagcctgttctctcagcccctcagagtgccaccatggaatggacataaacagtgccaaaagtgataagacctgggaattgctgagtgccaccagtcttctgtcaacatagctgacctgaaatctcctgtgacataaaagacctccatcaccttcctccagtggtgcagagaagtagtacactgagacaaactgtccgtcaggtgctctccccgactgggattctcaggtgggaatggatgctgattctgcctctcttgactgtcaacgtcttggaggatgactgtcccaagttgttccaaacagtacaaagacagaagtgctggggagaccagaaacccagtgtgggggaggcaaactctgacttttcagcttcttcaatatcccctgttatgagtcaaagaagctagtttgagcttccatgtgtagcagggatttcctattctgtcaagccacgatgaacacttcagtgttgcccaaactgccaaggttttgttatggcttgtgcatgaatccacacagcaaagtgaccatcgggtggatggtcagatgcatgcagatgtcttcgccttgtcgttgagaaagtcagaagtgattggaatagttgttttgcccatttcataaaccaacactcccggtgttggtggttactgctcagccattagttatgaagaacgtctggtcaagcccaagctaagttttaatcttcatgattccctaccttgtgtgggtaaagcacttcagtacagagcatggcccctgacacacaagggacacctgtgattgtttctcattaagatgatcgtgccaagtatttcttcctttcaatgtgcagtccattgccctgcgataaggcagaatctatttttctaagtcttggaatatgggttcaccagtgtaagcctgcacgcatggaagatgaagagatgagaacatggatttcaagaggagatacttcagagtcttcgcaacatccacccaaatgtctcgggactttggctctagaggaagttggtcacaatgtaagaaatctgatgacccaaagaccaccaaattataaggagacttaagctaaccgtgtgaacagagagtcctgattagcctaaggccaaaaacacaaatgaaggaatcctcagcttgctctaacatcagctactacctagctatgagcacatgagattccaagtaagagctgcccaactaagctgccaagccaagaactaggagtaagacaacacactctcttactgtcactacacttagaatactttatcaacagcaaaactgggtagctgaaacaggtttctatagatattaaataagtacacaggctggtaaaaacaaaaacaaaaacaaaacaaaacaggccacttagaaaaaagatcactaagcatgtctaatgaagtccatcaaatacattatttagggtacgtcagcagtggtaaagaccatttggaaacaggacagctttgtggatagttgtggccaagaggaaatctgctatggagaaggtaactttttttttttttttgagagtggaattttccaaactcaccaaccatctcaacaggactcattagctgattgctcaacattctgctctcctttgcacaaagcaaattcatgacagtctcagccatgaatctaggtacaaagtagtcaaaacatatcacaccaaggaaaagcatcaataagcaaaggaaataggttccgtagagctcaacctgttctcttattttgtaaaacagactgtggaccaggtagagctgtaaaacaaccaaatatagctggagataagcgtgggcgggagtggaaaatagaggctaaatgccgggcaaaggcagctgtgacatcattaacagcccccatgattgtactgatatggtcacccctttattatgacaagcttaattatgacacgatccatatctactgtgtctttgatggttgtaaataagcctgagtcattccgccatcattcttaccacagacacaatagttttagcctttgggggtaatgaagaaattaaatgccaagaggatggatttagtccttgtaccttctgaggtaaaacaaaacagagccttctccccccttcctgagtatcaattatttttatggctgagtaggtcttcctggtactcaaatgccacagctctctcacttaaagaatactttccactctgtcccagtctaaacccacaaacccctgatgcccagagaggaatcccatctcttgccagagtacaagactgtgctcagaatcagctgaacaaaacactgacacattttaaccaaccctataaacaataacaaagtttgattgtcagtttcactaaaaactatgattgacagtttctatgaactcataaggcagagcatctacaaatcctccatcctttgtctgtgtgtgcagacagaacttaggactcagggtcagcctcactctgagcagacagggagaaagcgcagagagctaacttacatgcacagggaccactttcttggttccttttgattcttccatgttaatgaaaccaactgaaaacaatttattgtgtggcctggggacagagttcatcaaggtctgttcttatagatcaggggataaagaactcaaggctggagagatggttccatgattaaaagcactggctgttctcccagagaacctgggtttggatcctaacacccacacagaagcccacaacggctgtaactccagttctaggggacctgacgcccctttctggatcccaggggtactgcacacatgtgatatatttacatacaggcaggcaagacactgatacacataaaatataaacaaatctttttttagtcatcatgatgcatgtgccacaccatacagataaatagcttgacttgtgaccagactatttctataaaagttgcctggaattagcataataatgatatgggggaggagcttaatgtagaaaacgaaaaatacgaatcctcccagttaccaatagcaacaataacaattgctagcatttcccgagcactcactgtgtggcaaaaactgttcagtctttcgtgtgggtcccccccatgggatacccagccaccctcagagctgtctcatcttcacccttacttatttgggtattatttatggtgaacacaagggcttgagttgcagtaacatgcaaccagcaactggtggggataaggaatcattgaaaataagaaccttatagacccaatcgccatcggcaggactgacaactggagaggcagctccccagaggcgaggagacacccgaagctccgccctggcttccttccttggcaggaattgtgggtgctttgggtgacaccccacacaccctcaggtcggtccctcagccatccccggaccaggggtgtccagtgccaagagctattctgttctgttgaaagcggaggatgctctcctctgaaataagtacaaagagctagcacatttagccagtttatgcaaaacacagaacggcatctgccatctggaggaacacaccaacgccatgagccccctttcaaggccttggcgtctaaaatcatcgtttctgaatgggtcacgtgactcccggatcccttgcatgcgattctccatcctgttgctggccgtccactctcccatcatctactcctccagtttgaaaacaataggtgggtaatagataggtaagttacggattgatggatagatgatagataaacatttcaaccaatagataggtaatagatacacaggcaataaacgaattttacatcttctcagtaatataaagatttccaagagatgacctgaatattaaaagtttttaaaaagacaataaaaaaataaactcttcattgaggtgtggtaacacatgcctataaatttcaatatccaggacccctcttcaggaggattctgagttcaaggtcaccctgatcctagccaacctcaaccacatggtgaaacactgacagaaagggggagggagggggtataaagagacaactccttcatagagacctttctattggagtggtgtgtgtgtgcgtgtgcgtgtgcgtgtgcgtgtgcgtgcgtgcgtgcgtgcgtgcgtgcgtgcgtgcgtgcgtgtgtgtgtgtgtgtgtgtgtgtgtgtgtgtgtgagcgcatgcacatgtgtacatgcacattggcatgtaaataatggtctgtttgtgtcatggcatatgtgtgggtgtcagaggacaacctgggggggtggtcctcacttgtcctccttgtttgagacagggtctcttccaccctgtgtaccccaggatagcttagctggctcaagtgtctctggagactcccgtctcattctccactcctgtttcttcctcccatctcctgtagatgtgtgactattacagacacttgcgctactgtgtcctcagccattacgtggcactagtgatacaaaccgggtttccagatttgagcaataaacacttaatccacagcaccatcttcccagccgtgacctccctgatgatcccatggggacttgttttcctctgttgttccagaggaccacatctggggccgctgctgtctctgtgattatcaacccattgtctttcttccattcctaacttcaaggattcatgacagacaggcacacaaaagataacttgggtcttgctttggagccagattcgagaagtggagatagagacattcccagaggcaacaggaatgaaaataggtaagatgctgaccatgttacctgaagaactatgggcaaatagacaagatggagtttagaaaagtcactgtggtggcctctaactgaaggtggtccaactacatgggctgagaagggacagaagacctatctacaagtcatctacacgcctgtaatcaagttacctggggcacagaaacagagagaaaagaacatgagacagggcacctgggtaaaatacactcacccatcccctttccactagtcaggccactgtcaccacagccaagagagaatggcaaggggctatgaagacctgggtgcaaataggttaagcagtgctgtggtgctaatatccaacttaagggcaggtagcatgtctgtccttccctgtgaccaccatgtccccctggctaaggatgtgtgctgagctccagccagagagctgtcctctgtagcattattgattgtcccctgctagtatggttttgatcctaaatgcaccccccccaatggtgggtatgttaaatcttcagcctccagctgatgggtggagcttaaagagaataagtgattcagtaggctgcaggtccttcaggaatgtgttgggctcgaagccctttcttcttaccgatttattttgctttcctggacatcctgccagcacacgagcagcttcgctctttagctgtccctcaccacatgtctcccgagatgaggctaaatgtccacatggggagaacctacagaagctgtgtgtgagtctaaataaatgttttccttgtatactgatttttcgcaggcattttgtcaactaaaaggcagcatatctggttacaaatgatcaagtgattttttttatttctttcaatgtatgttcatagccttattttataacaaacatagttccaaagttcctggggaaaagaagctaaaatttgttcaaggaagatcaaaagctgaaagttggtcaatgaataacatttgtttgacttgggagcagaaagtcctaccagaaggcagcatgagggtctgagcagcagcctgtgctggctcctggctgttcaagcccatgtttgctgcctctcttcccaagtatttgcttcctcattgtctgcagcccctctttgggtacatctaaccttcagatttcagaagaaatactgacacctcccaccagaaatctggttcatggcccttccaggaacagacatgagcttggagcccatcaaactaaaaaagttaaaagttgagcttcatcacttacagtgtgagcagagacaaatgaggcaaactctgcagtcctcagcttcctcacctgcagaacggatgctgcaggagggttgtgttgtcctagcatcttccttgttgctgttagcaacaaggatgagttgaggtggtaccaccacccattatgtttctatacaagccctcgtcccaccactcctggacatttggcaattgctgcagacatgatgtgacaatgggctttggtatgttattgaagtgacattctctaactccaggggctgaagagctcgttgctatcacaaacccccctttgggccagacctgagtgtcacttacaccagtttggaaataatctacttgctcacccttccagcagaggatgtcatgattggttaatggaaagtgacaagggggatagaatgaatacaagagggaagggttgggattgggaaaaagaaacctttttctttgggggaatgtggagcgctaagcacaccatgttaaatcgtgcatgtcaaataacggactaattaagaaccttcatccgttggtgtgtgtgtgtgtgtgtgtgtgtgtgtgtgtgtgtgtgtgtgtgtttatctctctctgtgtgtgtatgtatctgtgtgtgtctctgtgtgtgtgtgtgtatcatctctgtgtgtgtgtatgtgtgtgtctctgtgtgtgtatctgtgtgtgtgtgtgtctctgtgtgtgtatgtgtgtgtatctgtgtgtgtgtgtgtgtatcatctctctgtgtgtgtatgtgtgtgtctctctgtgtgtatctgtgtgtgtgtgtgtatctgtgtgtgtgtgtctgtgtgtgtatctgtgtgtctctgtgtgtatctgtgtgtgtgtgtgtgtgtgtgtgtgtgtctgtgtgtgtatctgtgtgtctctgtgtgtatctgtgtgtgtgtgtgtgtgtgtctgtgtgtgtatctgtgtgtctctgtgtgtatctgtgtgtgtgtgtgtgtgtgttcacatctcatttttgttgtcttttcatagatgtattttcaaattagctttatgcactctcaataagtgctaacgggaaagagaaagaatccttgcccatcagagaagcaagcagccaatgtacaacagaagatacacgaagggctgggggagaagttttatgatcatggtagcaacttctcaaataatggaatttaatagcatataataaactgtgatccaggagaactctgattcattcccactaattgttctagccgatgaaatgaaggcaaagtttatcacgccaacatgctgttaagaccgtggagcactgcagggaatagacaattgtccccagctgcctccctcctcactcccagagggtatttggtccttgccctacaaaacaccctactgcgcctccagctttcaatggcaaccccacttctaagactttaaagtcacagaaatgtaatttttttgcaatcaacaaactattgtattctgcagagaacagaggggcgactagacacaaagccaccaattagatcataaagaataataactaatatgcttcacggtgatgccaaaaagtacgaaaacctataataaatttaattgggcacacgatcataagcactgttttctacctacaaacttctgctatattaagctagactccaaatagagaaacacatttttatcattgtgatgggaaagtatggtttttttccccactgcattctaatttggatcattttaccaatgtcaaaaaagcgggaaggtataattaggaaaaagaaattactttctctgttgttagtcattggtcatgtctaagcggtaaaatgaatgaaggaattaaagcaattatctgaataattcaggtgccccctcccaaggtcagaggtttctgataaaaaaatattgtctttgcctgaattagtaaggtaataatcttggttttctgcttcattttctaattgtgggtctgactataggtgaagaatcctttgtactcactttcaagagtttttccaattttcctgacaaagagtatattatttttgtgcacataaatttcatgaatgtcagaaacagctaaaattctacagagcattttgcaaagtaggtattgaaactattaagcaaaaccaagtgaaggatttcctttcctttcccaaaagaaaaaaaaggccaagaaagttagatggtaccacagaggagctgaggtgaacggcatctgtaaatggagactctaacgggaaaattagcactgggcacgctatggacagctaataaagagaacatggctaaaagagattaaggttcaaattaaggtcagagaagagacggtagaggaaagctgccatgttccgtcgcatggcagtttaagtgagacagttccccccgaatcaggcttagggtgaaaaattacactgttggggttaataaagaggctgggcatttgtttggactgagacttcaattaaaatgttatttggggcaaccagagctagtgtcgtgcatagaggtaaactgaagtggcttttgagaagataaaaaaaaaggaaaaaagagagagaaagaaaaagaattaaaagagagagagagaccacctaatctgtcacaggctctgacaaagtggcaggaagaattgtgttagctggacccgagcccagctcagcagcaagcaagcgttcttaaagattctgtgacatcatcccaggcagctgaggtcctgtgagtttttgattgttgtcctgggtgaggaggctactgttcagctgagccttctttgagacaaaggggaaagaaatctggttgatataatatgccaagtttttcttttttttgtttaatgccacaaaaggggtgggaccaagaattttggggctggtgtccccatgcagagacaaaaattgatgcatgaggttaactaaatttctcattctgtataaatttgcacacagttatacaaagaaaggagggtgggtgcaacccccacaaatccttccttcccttagtgtgcaccccacatctcacaaagccctgcagacatgtttacactggccaggactgggtcttctcatcaactaagtgtgcatgtttccctactttgatgcagcttatagtttaaaggacaagaggcatttaataaattttaaaactatgtagctggggctgaagagatatctcccagtccacaaagtggctgcaacatcaacacgacgactaactctcgattcctagaacccaagtaaaacctcacacatgcttacaaccccagcattagagaggcagaaacgcaagggtcgttgggctcattggacatccatcccaccctacttggtgagttccaggccaaaactcaaaactaaggagaacagcgcccgaggaaggacatgcaaggttaacctttggactctgtaacatgcttgcacacacaaacttgcatacatgtgtaactatgtattgatgacattaataatctgaggaagagacaggttacagaccatgtcaatgttttcttagctaactccatcagtagtgacaccagacttcatcacaagggcctgcaggctgaggaagctaagcacagggagcagagcatgtgacattctgttgggacatcttgaatcgggtcatagagattagcaaagggtcacacagagagatgtgggccaaccaaaagagtgtggcttagacccaacatgaacttgcaggggtggggaggggacttgccctggcatttcttgtatgatctgagcgacagctaaggtataagaccaggaaaggcccccaggaagaagacaaggccgttgtctcaccatgaaggtgggatgcaggaacaacagggccgaggtcctaggaagagcctgttattcccgccccttgtctctgagtttagttattgtcaccaggaaaagagaatgaacccaagttggctccaccctccttcttctcaactttgcaccccaaaatgttttgctaatctttagaatattccctttttgtgggggaatacatatgtgtgtacatgttcatgtacatgtgtgtatgtgtgtgcatatagaggccagaagttcacactctgtcttcctcaattactctctgttttactttttgaaacctgaacctagagcgtactgactggctagagtgactggccgtcgagcccccgggatcccctgccttcacctctccagctgggactttgaaggtgcatgcagccacacccaggtttcacaaggacactggggatccaaattccagtcctcgggcttgccctgcaagccacttcacttacttaggcttttagcccccaatcttcagactattcttaagaagataatgttggcttaaaaataagaagggataggaggacattaagaaccagacacaatgacaagatgaaaaatggaaaaggctttaaacacaaaatgccaatggtgaggtcactacaaccagagaaggaagccagctcgttgagaagtcacacaacttccgtgggtatcacgtcttcacaagtagaggcaatatctgccaggtccagattggcttggttagtcatttaaaaacacacgcacagaccacagggaaaaaattcctcccctcattgcacaatagctgatcattaggataaatggaaacggagaagagcagggactctctcaggcacaagcgtttcattcacggccagtctcactttggttaagaagaaagtatatgattccttcactagacaggcatggatgtaactaactctaaatggaggtcagggcagctcatcctgcaagcatggctaacacatgacctacatggccctagatacagtcagggaaatgggttccagaattatatattgagctgatacctagctgcatcctctttatccttcaggtctactctggccggcaggattctcatttagaaaatgcttgtggggcattttctcaggcatggggttctgtgctgagcaccctctggtcccctctgtcctgccctaccttcacttgtgctcagagcattctcactgcctgatattataaaagagctatggtcatttcctgctcatggactgaaatataagttccatgaggcaaggactttgatgtcttattgtatgacatcccaacagctaaccccacaggaagcactcagagaatacggctggatgaacaaacaactttacttcgttttttgataagcaataggcatgtgagacctttctagattaggcagctgccctggtttgctttctgtttctgtgatgaacaccttagccaaaagcagcttgggaagggaggggtttacttcatctacaggttaccacccaccatgaagggaaggcaaggtgggaactgaaggcagacgttgtagcagaggccgggaggagcagtcctgggatgagcactgcttcctggactgctccccatggcttgctcagcttgccttctcatacaactgagaactatctgcttaggggtggcaccgcccacaatggcctgggcccacccacatcactcatcagtaaagaaaatgtccccacacacttgcctatggaacattctggtggaggccacacctcagttgaggttctctttttccaaatgactctgggttgcattgacctgacaaaaaactaaccaggagatgaactttctcatgcaaatgaattttaaattggaccttgagaaatgaagaagaacttacctatagaaggggtcagtggtttattggccatcatctttgttactgtaacaaaatacctgaagtaggcactatataaagaaaggttcaagctgaccaacccacaagactgcaacattccctgctttttcctcagtctccacatcttacaaggttcttttacataataggttctctgacatcataaatttttaatttaagccacatactgtagcacacacctataatcccaacacttgggatgatgggaagagtttgggactaacctgggctacatggtgagcttgaggcagccttggtttcgcagtaagaacatatctaaaaaaaagaaagtttttgattcattatcaaaacttaaaataccagtattgtgctattacataaaaagggggaaagaagccctagaaacatggatatggtagatatgactccctgtgagtcatgagcttatgcaggagccaagaggacacagtgaagagccagagaaaagggagacatggaggtagatgtgactccctgtgagtcatgggcttatacaggagccaagagagcgcactatgaggagccagagaaaaggctaagattctcaaccacctgctgctccatcacaaaggctgtcccccactaaagaggcaaaatggggagacaatgtttgttaactcagaatacggcctataggagcatttcatacagatatatcgagactgtaaaattctcaaattagtagcaactcagaagttggaatgccctagacaggatgcctctgctgaaaatgacatgtttgttagatcataaaagacatgtccaataacaattcccagtgtcgcaggaaaataactcaccattgtgaagtcaatacccctcggggagaaaaatatcactcattgatagaaattgatttttcttttccttcagaaattcccgaggggtaaacaacgatttttcttcacagcaaatacaactaaataaggtgatgtgaaggtttatgccccgccccctgtcatgagcatgaaactcaaaatgattagtgtaactgtgaatgccttctgacccatgggaaagcggactctggttctatttgcttcaacgtctagcatccaggctatggaagctccaagctaacacaacacgtgctcccagctttccttgacaggactagtatgggaaacttttggtgttttgaagacataaaatattcacctaaaaagtagatcattcaaaagtccaaaggaatctcaaaactaaacattcatgaacttcacaaatgcaggaaagtttcataaagaaacaagactggatttagtatattttacgttcagcttgttggttcaaaccagtgacatttacttattgaccaggcctcagtgagttacaaattatctgtgtcataaattgtcttcctaggccaaaatgaaactgaacaaaagcttgctttcctccctatttgaaactccaactttggatgagaggggacagatggatgagcgggggcatgggaggagaagttattcaattcatgtttgttgaaatgggtgctgcagatcactggcagagttcccactgattgacaactccccggagcagctacagataatccagcacccagatgactgggttctctgaggagaaagcccagttggtgattagaggctgaaactcaacagaaggaaactggaagccagcaccctactcatgcaattgtgttctttgatcctttgacggggatggaagtcagtcaatcgcactcttgaaatcatccctctcccctccgaaggagcatacttctcaagcggcttgagtggacaaactcaggagtaaagctcactgccccgttacatatggtcatgacctagaggttggccttggtacacatcaaaccaaactgattttattcatctaatggtacatataagctacatgtctggagtcacattgcacatctacagaaaaactaatacagagcaaaacaaaagccaaaaatgtaaataaaaacaaacttaaacatttgggccattgagatggcccgctgggtaaagggcatgccaccatgagggcaggacaacctgtattccattcgcaggacccatacagtggaagaagagatccaaactgattgccgcaagttgttctctgagttgggggagaggagagggagaggacagagagaaggagaaggagaaggaggagaaggaggaggaggaagaggaggagaaggaggaggaggaagaggaggagaaggaagaggaggaggagagaggaagaggaggaggaggaggaggaggaagaggaggaagaggaggaggaggaggaggaagaggaggaagggaggaggaaggaggagaggaggaggaggaagaggaggaggagggaggaggaggaggaggaagaggagaagaggaggaggaggaggaggaggaggaggagggaggaggaggaggaagaggaggaggaggaggaggagaggagaaggaagaggaggaggaggagaaggaggaggaggaggaggaaggaggaggagaggaggaggagagaagaggaggaggagggaggaagaggaggaagaggaggaggaggagagaggaaggaggaggaggaagaggagaggaggaggaggaagaggaggaggaggagagaggaggaggaggagaggaggaggaggaggagaagaggaggaggaagaagaggaggaggaggaggaagaagaagagcaggaggaggaggaagaagaggaggaggaggaagaggaggaggaagaggaggaggaagaggaagaggaagaggaggaggaggaggaggaagaagagggggaggaagaggaagaggaggaggaagaggagggaagagaaggggggaggaggaggagggggaggagaggagaggaggaagaggaggaggaggggaagaggaggagggaggggaaggagaaggagaggaggagggggagaggaaggagggggaggaggaggaggaggaggaggaggaggaggaggaggaggaggcggcaatgactagataatatctggcatctgattcagtgagattcaaactgacccagaagcagaagggaagtccaaactgctctgtattcatacatgcagccaagggttacaaactgctctgtattcatacatgcagccaaggtttacaaaagtgaaagttccagaagttattgaagggacttcacccccctggaaagacttcactggtgaccacgggcatgagtttacccacccacaggtgggtctgtggctggaggagtagacagaactcctcatgaaagtttctgctaagtctttctccagagcaaggtctggagatgtcagcatgatgaaactgactaggaaatttccacacaaggaaatgcagtgaatctgtggcagagtagctgtgtgtttctctcaatagcatgttcaagactcaacggcaggtcactcagagccacaggtctttccacgtgccctttctgcttttccttcaggttgctttctcttgtcctttcccagtgctcactttggggtcagaatgactgtgctcacagcaggtgggaatcagtgccttggcccattgtggccagagacaggggccttaaggagcatctcccttcaaaacataggttctcagtctctagggggagcaatgcctttgtctctgtagctctggggatactctggctgagaatgactcccgggtcccaaggctcctggttgcagaagatctcttgccaaaggatggagggagcacatgcagctcaggcccagctgccccagataagaggtggccgtgttaacacgcaggcttcctccgtgcctcagcagggccttccttttccaaacagtctccctttaatgttggccagtgttgtttttccattgactcaacatctagcctctggtggtgagccagtggggaaaactggagggggggggaccatgggccagagggtgcctaagccacagaaagacggacagccagccacatcgccaaacaggctggacacctgcttcggaaagacagtgacagagtctcaaagccgtacttcctctccaccagcccttcctccgtacaccctgtcagcagtggggccctcgccactgcacacttcacctgacctcacttcagctggaaaccttcaagggtacataacctttcaccaggagtatcactgtgttgtttaaaggaaaggaaaagaagaacggtgattaaataacaccaaagaaggcaaaggtgtctaggagagcagggctgagaacacagctcagtgatggaatatgtgcttagtgtaggcgaagcaccagattcagagcccagcgcccccttcctgaaaaagataattctaggcaagaaatgatggaaggaagccattgagatgagggagaactagaaagaaaacagcaaaaaaggaagaaaggcaagaagagagaaggaattatgagatggaacattctagaaaagatgaaagccagtggggggggggcggacaaagaaggtggaaagggtaaaagagaaaagaaatcagggtaaaaaggacagaaggaagaaatggaggaaaaagggagggaggccagtttccgtatgcaatccagaatgtgctggttcctccagaaactgtttctggagccccaggagagggcacggggttgagggtggactgcaaacttctcaggagctgctttgcacagtccaaggtcaaagggcatcttcaaaaccaaatctcgatcagagccagctaaatgttttgacttgagggagacactgcggattaaaaagcaaaatagagcagtgtggggaagaaagggacaggaaaagaaagaaaaattaagaagtgaaagaaccccgtgggagacacaaaggggacgctagaaaacacttctgagtcagccactgtcgcctaacacactgtgaagatcgccaaagacaagttgtcacgttagtttagtgagactgacacagtacttggtctccttcctgctctaatctccccctgcacacagcagaaacacacaccacgtttaacaggattagcctgcccccccttttatgtttttttacaattctatttcaacaaaatgaggatccttggatctactagtttctgtggtgcatggtgaagcctggcacagcctttatcctttacaggctttgcttaaatctggagggaaaacgtaagtagacaacttggtactttttctccattcattaagtttgttgtggaaatgtccatggtttgggtgggggtgagaacactgatggtaggggaatcaaaagctgaagctgtgagaattgggctgattgaaacaaaacaggctgcagggtggcccagagctgaagagcactggctgctcttccaaaggacctgagctccactctcggcccctacgtggttcacaaccacctgtaactacagttccagaggaccaatccttcttctgacctctacagacactaaggatacacatgcctttgtgtacatacaagaaaaacattcatatgtacaaacagacaagctgttcctgcagcggtgtctatggcctaagggaaattgtctcagctctgactgcaggatgacctatgaggtgtgtaaccgtttcctccaagaatgaaacattttatctcacagaaagctccttaaataagaagacaaacaattaaaaaatagcttcaggaagtccctgaaactaaccagattcactaggcccttccctgccaaagtaaacaatacaagcggagagtctctcccacatgagtgaagccaagcggcaaggaggactctcagatgggctaagatgcaaagactctgagactagaccagctgtctgggagacatgcctgggagaggtttagaggagagtcacttggaaagggacactccaacctgttgtgtggcctgcaggctgtgcagtgtgctccaggtttcccaacttttgtgagttgtcacccaggctggggtgagccttggtgatttgagtcacttctgctcctgtaagtaaccccagtaaaactcattgattcacctagttggactttagtggtatgtactttggactgttatgggacccccaaatggggtgagtagtgttttatctccctaggaaaagttttgccacacaacactaggttccaatccaggttctgcgatttactgtctcttggtcttgactgagttgtgagacctcctccagcctctgctgactcatccgtgctgcagggatagccctggctattggtggaatcacataccacacatttgatgtcctccctaagattcttatgttttattatgatcttgcaatcaggacacccaaatctaatgtgaattttaggtcactacattttccttctatcccaaaggtcatatttaaatgacagtcttttctcatgctctatgacattttcttttctttctacaatttatttgaggtatgtgcatgtgagtgcaattgccagcagaggccaagagagggcagcagagtccctggagctgatgttacagtgttgtacaccacccaagatgggtgctaggaaacaaacccagggcttttggaagagcagcaagtgttcttaaccactgagctacctctcctgaccacccagaatattttaagtaggaaaacataacagaagtgtaggaagggcacaaagtcagtggcacagagagtgctttgtccctgtggcaggtggctgatatactgcctattgcagcgctactgtttcagtgaaaaggtcctgttggaatatgaggaaatgaggtcttcatgcttttgcctctcatccagattttatagaacagagctcctaaccgaggcttcagaaagctgaccagatcaaacacagctaatcactgctcatgttgggtcagcatcagaattgtccatgggctgctcacaacagggctgccacatgccaggctttgcagggtttcacagcagtgatgccctggaatcaagaaaatggtccctttttttagttcacttgcagtttcactcctattggacccttctagaatcacaaccagacataacccctgaggagagacacagggagctgtccagtgttggagaaagaaaagaactgggtcttatggagtcagaggcttgaaggagccagccctgggccttaggtggggcagcaggagactgacttaggagcaaagcagaagctgatattcagggtgtgttcacaagcacacacaaggtgtcactgactaggtggagctcataccatccttccttacacacacacacacacacacacacacagagagagagagagagagagagagagagagagagagagagagagagagagagagcacccaagatatctgtcctctttgggtgatggctacaaggtgttggtccaagtcccttcacagccagactgggattatcaagtgagctgcttcaaaaggctggcctagaggaagccaagaaacattggccttcaccagagtggaaccaaggccagatttaacctcccacctccacctttgctcttgcctggcccttcacccccacttcaaccctgctgactcctaaagagtgtctgctggagctggtactgagttacatgcccggcaaggtttctgcatccctacttccttccacactcccccctcagccttctctctcattctgtctacagctatatgcaccccagctagcctactcacagtgcacaggcacccctctcctcacacacacacctgtgctctctcaactcctacccacaccctcaaacttttccttccttctgtcaccccccatcctttctcttccttcctcccacccaaagtctcccacacactctttccctgagccccccacccacaagtaaagtgtgtgggggaggggagtgctctttctgctagacaggggcttgtgaatagaagctacaagttgccctgtccttctcaaccgcttggccccagcaatatgtccctctctagttgtcttagctgtcattttactctgccctatagggtcaccggctagctaaaaagcataactcccacactccccaagatacacattaatatccaagggcaagtgtagaagagaggtgtcctcaactcccctcatgcaggtagtgccacacacacacacacacacacacacacacacacacacgcgcacacacacactctgaggtccacccacccagacctgggctacttttagctggtattcctttcctgaacccctgtaatctaggactcctggctcaggcttccagggttccaaaggccccagtcacttagtgtttagttgactgctaactcctgcttcgagctggccagcatcttggtgtgatgtctgctgggtcagcgggtccatttcctgggctctcttccctaggtctgctacacggtggcagccaggcatggcacctccctgcctgtctccctttcctgctcacaactgcctttggctgggctctcactgtattgccttgcagtaacttggattcaatggttttagtgacattttgtgaaggatttttttttcctttacatgtactcaggagagctttttttccccaaacatatcgaaacatatgacatgtggcatgcatttgtttttgttttacccagaaatgtcgaccttatttttcctgtttgcagagttccctctccagtagaatttttttttgtcctgttttcataggcttgacctatgccttctatagagaaagaaggtttgttacctatgaagtagagagggcaaagggggccaaaaggcaaataccatgatggtaaatggtccctcctttcctgtggacttgtgcctgggagcacacagccaagtctgcagacaagcatcgatgtgaatttattctgtatgcttaaaagagttgggggtggggcacataaaatctcagacgccagccattcatgagctagtcccacagtgcactactagctttgccccaaggttgagaacaggaaggggctccgttatgagtatttttataaaggatccaagtgtcctgctcactcttgtttgaaaatggccaagtaccaatcatatcctgaacaactttttgcatcaaagcttctccattaactctttgatttagggtattattcccattttacagataaagagaactgaggcacaggcaaggccatagagagtagaggactcctgaccattgacctgctgtgacccccagattcctagatcctcccttggatctctttccccgggatggggtcagaattgtttttaaagcatcttgggtagttctgatgattgtcaggtcctcagctactcctgccccttatcacatttcccaagccctgtcaccatgctagcccccagcagcttcctcctccacgttggataaaatatttaaaacacacttaaacagcaattttggggaactatgtagcatatgggcttgccttttgatctcaaaatgatgacaaacagatacttagatacttcataaaagaaatattaccagaaaaaaaaataatagaaatctggctttcagcttggtcgtgctctaatttaaacaaaatgcaacttcgttaggctcccttctccgggaacaaattcacaaccgcagtctcccttctgtgctgttctggccttggcttgtttgtctctagcactggtcgtcagtcaaagctctgagaccgtgtaacctaagtcctgtcaccaaaacccaggaaatgaagagagccacctctgaattctcaaacaccaaaggaaaagaaccgggaaaacagctctagccctgtggacagagctgggctaggccgagcgggagaccgccatccctgcagagggtcccctgtctcgggaccagtgtgtgtaccggttgtggcgcgccaccaccgcagcaacaggcgggcggcgggggaggggacatggcggggacagcgcgggcctggcaatggctcacgtctgctggccgagtgggacgctctcggccccggagcaggtggctgtcctgtaccgcccggtgtgctctgagccggggcaaacagagccgagcagcggccgctcgtgcagcggccaaggaaggaggcgagggccgcaggacgcgggtggggacaggacaggcggcgggcaggtggccgggatccccgtaggcaggctctgtgggctctgtggcgaacgtggcgccacagtctctcgaggtcaacgtcttcccggcctggaggccgtgacgcttagcaaggggtcgatcgagaaggccaagcctggagtgaggacaggaggaccccgcgagggagccccgatcgctcctaacgcctgctgggcacactcccagcctcccagccctgcccgcaggttttccagcactcgcgggagtgttcctcgcaggttttggaaagccagctccgagcgggctccgcaaactctgtggcatacagaacctgggacactgggaggagtgactggggctctctcgggaggtggccttgggagcgaagacaacgggaagacacaccgccattctcagagtgcttaccaccctgcccgggctcgaaagggtggcggtgcccagaggcttggcgtgattttgccacttggcgccccgcgtgcaaggcgcccgctcacattcgcacccttaccccaccccactcccgcgccactgcggccggagcctgcctttgtacttcgctgacagcaagactggctgatcacacccagtggtggtggtggtggcgcgtgtgttggtgtgtccgtatgtaaatgtgtgtacattccactcagtgacacccccaagtacgagggagagcaccccgtttgtccccacaggcgtccctcagcttatctctgacccaggctctttccagcttccctgtggtggactgaagaagataagataaccggtgtgtatgaagaaaggaaagaaagaaagaaagaagaaagaaaggaaggaaggaaggaaggaaggaaggaaaaccgaaatcatagcttttcagaactctcgccctcaaagcctgggtgggtggggttgcggatgagcaagcgatctcggggagcaagagcagccccacggaaggcgagcgcgaggcctggcggacgcctctcgcgtcgcggcgcggccgggcgcagtggctgggttatgtaagtaagagccctcctgcgctccacaccatctgttaatatcttgatattggaaagttcggtgcctgaggcaaagccagggctggcggcgaagagctcccagcctaccccttattcctctagggcaggggatgccctcccatcgccctttgttcgtttctgtccattccccacaacaagctgtcgtgtgacaacccccccccccatcatcatcagcccctcatccccgtggagttgtgtttttctttgagatcaccttgttgataataagtccttactatgcatgtttatgtttgtggcgatcctgtgcccttttatggtaaagtggggggccctttttattctggtggggagcagactttattattaatttttattattattactttttctgccagtcctcctggctcccagcttctttggagtgactcgcgggtgtttactttgaaaactgttggttaaacaaacatcactcggaggtttctgagcggtggggttccccagagagaaacgccgcagctgctacttgctactgatctggtggcatttcactttctcccccaccattcagaacaaatccaggttgggttcggcgtcacgctgggcacaggggaggagagcgcgagaggacggccatcaacccgcctctaggcaacctgcagctggcaggtctgctcccccgccgtggcctcttccttctgttcccctcctcaggtgggtggcggtagtggtggaggcgagtggtggtgagctagtaggaggccagccaggtcctccaacaccctttcacaaaacccgctcccacgtttgcctcttcactgcatctacttgaaaatccccaaaacagctcctaggtgctgatgcctgctgctcgtgcggcttcaaatgacctgcaaacactgccctcccggtacttagcccccacctaagggttttaagaaagaacggggatggggtggggggagaaatacccagagggaaggtcaaggcgaagtgtgtttagcctagagccggatgtacagccgcctttctctaataacacacaaatcactctccagataaaccagctaatgcaacctgcacgggggaccgtttgtcccagcacggtccagaacttgtgctcactttaaatcaccaggaccgtggctggcccgggtggtcaaaagaaaggggtgtaaggaacctaggcttggcccctggcttcgcagatgaggcgggtatctagaagacttctggtctcctggctgactgatcgctttttcgctatcaaaaaacaaaccgagagttgccagagataggggccttgggcctcaagccttgctccaacgccactggaaactcgggggagcgccaccgctcaggccagacagcacggcccggagcctggttcatgcgtggcccggacagttagagacaagacaggactcatctgccacttttagagttcggggtcaccaccccagctcacacgccccgagaggccagcgatcggctttccacgcgcagctcctgagctctagtgcgggctgcgaactgcggctgagcctgcttggcaaactgggagccttagcggcacgggctgccgggggggggggggtgtttgtctgttcgaaggttactctagctttaactcaggcctactgtgtccttctgcgatatacatggaggacttagatttgagagtgctcaggaaacttttcccgccgccagaatccaggcgctgcgtgtgcaaaacgtgcgcccgaacgccaggtgcaactgacacaaactactccagaatggcctctctccatctacccttgcctttcccccctcaagctctttccttcctgacacccccccccttaaacgtcaagctgacgctaacttacaagcgaaaacagattcttcaagagaaaataaagaaatgataaaggagaaagaaagtggctctgaaccaatctcagaaccccaaattccaccctcctcagctcatccctttacctcaaaggtacccaactaacattgcatcccgcctaaccagcacgtgagtagatcatgtcagtccccagccccgatgggctacaagagctcatcgttggaggtgtaaatagtgcactgagctctggcagtgctgtttcccaacctgagatggggaaggtctgggggcagtttgagaggggcaagaggcttggggatgctcagctgagtgtcttctttcccaacaccaatctggctgacctgatttttttttttcccctctctccttcttcttttcaatgtttgaattccgtgccagccaaaagtttcccacagggcacagacttcagacacacacacacacacacacacacacacacacacacacacacacacacacagacactgcggtccgactcacaggagattaaaacactcttccattctgatgaatcggaggctggaactgtgaacgtcctagaaatgagtgtattcgtggcagatgagggtggtgggactgccagtgtactcgaatctcaaatactctgtcacaacacgtttcaacctttgatctgattgaattggagggacttggaaaaatccttgtccccacaataccttttctaaagagtgatggatcttctagctatgaacatttcaagtgctttacagctctggtgaggctcgggttttctaaggtgttcagtccacgacgcccctttggtaagcactgttgttaactgtgcccagggaaggagacattcaagctgcaaagggaggttttctgcagcatgtcactggaagccaaggccatgttatctgaagaaatctcactgctgtttgtcatccaagatgtcaaaccaatgtgcctttaagcattagagtccgaggtgttggcgtttggaatgtcttgcctaataaactttttaagcttgtcaccacgacttcaaaattgtgtaaattctatattggactaattttttttggccaccctggagtgcgagaactggagtagggtgactgggaaatggtgtttgtagcatatgtggcaactttgtctacaatttaaacattttaaaaggtaatcgagggtgattcctgtaaattttagggtctgattgactgggatgtagtcaataataggtagagcttttaacatcagatttagcggcaccggtgtgaaatttctgatacctattttttaaatcctaaacctacctgtgtttgtctatcctctttaaaaggaagccagagtgacaggtcttactgatactatctatcatgtttccaaagcggaacgatttgcaacccctcaccccccccacacacacacacacactccctcctttatgccatccccacccttaaaacctccacttttcgtccagtatagtttttcgtgccttcctccaccccagtctggggagcgctcccctagctccgccgctgggagaactccatcatctgtatcagtgaaatgaaaaaaaaaaaaaaaaaaaaaaaaaagacctgcgccctggaagagggagtgtgagcccggcgccgcggtgcacaacgcccgcagatggctcgcggcggccggggcgcgcgatccaggcgccccaagcagtggcaggggggtggggccggggctggaggccggggcggggagcgcgggcccctctcccctcctctctccccagccctcacccccaccccttttatatatatgtaatttttttttcctcccaagttctcttgcctcgctatccccccttgaatccgaaggcgcctcgcgattgggtgctggggccgggtacgtcagtggaactgtgacgtgcagtcttcctgtttccttcagctgtgtcttaaagtaaatcttgttgtggagcggagccctcagctgagagagtgctgggaaagcggccgccactgcagccggggaagccgcgcagcgcacacgagcttcaccgccgcgcccgctgcgcctccagccaccgcgctgcgcgccgcgctccagccctcgcctcctcctccactcctctgctttctctcttctttccccggctccgggctctgccctgcgcgcctctcccctcccctccctcctttctcccctctcctcccagcactcgcccggctcactcgctctcgcacagactcaccgacccctgggccaattatcaccagtaagacatcaccgcgtgcgcgcgtgggtttcttctctctgcccgcaagagagagggagagaaagagagagagggagggaaggagtgagagagagagggagagagagagagagagagagagagagagagagagagagagagagagagagagagagagagagagagagagaggctgcgccccgctgctgcccgcaccgcgtaagtatcttcacccggtcgctgtcccctccccttttccagaaccgctcgcactggcttgttcttgaatgggaagcagagagaagagcctcccgttactcacacccgtgtaaacattctttttccagggggaaaatggtgttatttacatgaatcgtaatcaaatagcctctaaaaacagttttctaagcaggagcctcagtggaactccgcgctccgctcctcccagttacgaagagtaagtgatccgcttggcttttatttctttctcgtgtctgccggtggctggggtggtggtggcggcgatgtggggaggctggcgttgccggacttgtccctgatcttgtcaccttttgtgtactgtgcctggggtgcactgaggctctggcttccttttcttttctttttattttttcactttactcttctcgggagagggggccgagagggggccgagtccctttttgttgttcttcttctagctttcttgctgccttcccagcctcttccttccctcctcccgaggttgaaactccagggcctgtccgcgtccctttcctttgtcttgtttattctagctgcctttcttcccggcttttcctatttgcttggtgtttgcatacctttcacttctcctttttaacccccggccgagggccggccgtggggaggagggcggggagggggggcgcccggtgactttcctctccctgcgcgttcagagctgggagcttgcaaccggctctacagccaaggagggacgagtggaaggacggtcccgaggagagcgcggagcccctccactcagcccgcgcgcctctctgggaagctcagagtagggggagttggcccaggagcctcaggggtcgcctgtggggccatcgggaccccgcgctgcggaaggccgtccccggctcggggagttcttgtgcggcccataggcgagaagaagcccccagccattgctggcacgctcgggcggtgggcagctgcgctctggcctcggctgggtggtgctactgtgttgccccagttccgaggactggggagggaggagaagagcccagcggagtgcagaggtgagagtgattgttgctgagaagaacggcgtggagggcgggagaaagggggagagctgctatcttgcctgaacagacaaggagaagggcctgggggagggggcggtagacatcacccaaagtccagctgagcaagttgtcttcgcctcgacagtgctagccagtctgtcctgctaaaactgagcgcctgtgccgagagcgacgggggcccggagagagcaccgagccaccctcagactctcccgcccctgcccagcttctcgggaagttgagtccggtgggcagactcccagcagaagcagaaggaggggctggggacagtcttaagtagcccaaggaggcgggttggagtgtgaagctgccgttcttggcagcccagagcccttcgcctcggggaaggctggaaactcacctgcttacttatatttttccgagaacatctgtgttgtctccttaagcttatgaaaatagagcaggcccagggtggcctcctctcaaagtcaaggctagaagagtctcgaggttgtggtgtctctctctctcttccctagccctccttccttttaccagccccccttgtacccctctgtttaaaaaaaaaaaaaatcatttcctctcctaaaccaggcagacaaaagtctgttagcagaatgcgcatgggcagggctggacaggtgtgttgtgtcaagagaggcaggtgcaagtttcctgggtgtctgtgtttctgtacagcctcagaccacaaggcttcagggctgaagaggttcatgaatttatggtggttctggttaatgggattgccaggctaatgggactcgggctgttgtgttctgaacccctgccatgagattttttttggggggggaggacgtgggggtagtattatttgtttatttgtcttaagaatgttggcaggtgactgctgaggctctatcttaggcgtctgccaaaagcacaccccacttcagggtagcaggtggaaggagttgactttctctttgcttctctccagtttatgcctgtctggcaggtcagtgcttagcagagagggggtgaggagatcctttgtgtgtgtgtgtgtgtgtgtgtgtgtgtgtgtgtgtgtgtgtgtgtgtgtgtgtgtgttggatagcaatgggtagtttgtaactgcccgaaataccaaagtcagttcacaagtgtgacttgctgttaaagcttgtctttgtaatgtgctttccctctctgctcagagagaataagtatatgtctaaactctttcaagccctgtggtaaatactctcagatactgaacggtgcctgacactgtatcagacatgtgccaggtgtcctagaaaggactttgatggagagggagcatctgaatctgtgagagggagctgggctctggtgatgaggtatggcggaagatctgggcagccagttctatgaagagtttcttgcaagaacttctgagtgtttccagaatgaagcaggctgtgtgcagtggggaagacgaaaggctgcttgtgtgccagggaagatgttgggagttctgtgtaagtgccgagtctgggtgtctgggttcttaaaacttaacctctaggctgttagttaaacagtttactgccttaagttgagttgtgtgggaatagatcagatggtggacagtcttgttatttggaggttatctctgtttccatgaaaatgacagctatgtgtcacttagtcttttaacttaaacattaatctctgccccccttcctagcattttctttgtatgcttttgaagatttttgataattaagacgtcatccatagctatgctcgcatgcttatttttaataagtgttagtcatgcttggcacttactgatattttatgtgcccgttatgcagaattctatttagtttaatcaccaccttgtggggaaaagtcatgcatatacaacatgcatctttgttctccatgtgttcatttgctagctcggtttctctgcaagcaggttgtgcaacctgcaaacctgagctaactcactcaataagttgccaggctccttctcatttgttcaaaaactcataaagtcccttcatcatttcaagtatggtctcaactacacactatcaatattaaaatttttactgtttacaatttttcaaagaaattataaaatgttagtggtgtcatagtgtgaaaacagattttgcatgctttttgttataggttacaaattccgtgttttcataaattgggaggataacatagaagaaacttctccagtcttgttgcctaaagcattgcaaagctccaaagaatattttgagcattttggtttttctgcaacaagaaaaaaagcatgagtgcactttttttaaagattatttctcacactcttgtatttgcccaatttgatgaattgcaacttttaaataagtggaaatcaataccttgggcaggtctcagaaaatgttctgtgttcgcttttcaagtgaaaaaatgagtggaattttagataggatggaagaataccaaatgatgcggctatgatttgaaaccttttattgtaaaaggaaatttaaaattttcaccaataagatctcaattctttaaattattaacttatgcctagtaggtttttttacccttgtagcatgtagagatttctttaaattaaaagttgttaattagcagaactgagggagagcacatcgagtgacttagtgtgcctatataaatcaaagcacctgattttcccctgccggattcaggctgattttcagtatgacttacgatattgatgattatttttccacttgaaaccacatgaccagcttaactcattagaggcactttaaagatgactttgtaaaagaaataaaatccagccatttcttcaaataattttatcagcctggacagatacctgaataactgaggcaggaagccatgccagccttacactactcatcctcatcaaagatccgactgaactatctgggtaattaccataatgaaacacctctttgtctagaatctgggctctaggtagatatagtaaaagttacacatccccttccctaaataacttccttattaaagtcgagcccttagccactctacactgctgtgttcctttgactttctttactgaaaattatattttacaacattaggtcagcagtgtcctctggatcgatcttgtcaaacagaatgcagacacttgggtttcaaggagcacctttaggagcacagagttctgacttgatcatggcttgaagttgctttcccactattttttttttaaggaggcatctgccttgttgtgctgcctgttttacaggtgttgttagagtatgtgtgtaggccgtgtaccaatcaacgcaacatgtgtttaataatgtaacattttgccataggttttcacatgaatttgggagagctttataaaacacatgtatttgggcagtaagcatttagtccagattctattatcactatttttccatcttctttgtactgtttctcagaaggactggcccaaaggctttatttatattacctgcttaaaccccaaattggtattaaagtaaaaacattataagaacccaaagtaattggagttgaaaaaccacaacttagttcacatgctaaaagacttgaagttgttggatacctcagtgagttgaccctctgagtgactaagtcctcatgtagcatcctggaagctatggattggaaattatagaaatccttggaaaatgctcttagctgttttaatttcaccatggccacttgatagtgcattttgatgtggaaatatatttttgtacattcagttcaatgaaatatgatggtagacatgtagcaggttacccacctattattttttaatcttgcctataatgtccctggattatggccctgacgtgtacggttactctccttttatttctgtttaaatattaagaaactgtatggagaaataaattaatgtgtagctattaacataatgccctgtcttgctgggtaaaattatttttccccatttattttgtcctgttgtttatatcttagctggatattttacagggagacctaaagtatttgtattctccttgcccaaaatagaaataaatcattatttaatttttaaatgatatctgatacagatttttaagaaatcaatttagcttggtgagtttggagggacttacagggtattaggtctcaatgggcccagtgcgtatgtctaattaatatctactctccactgaagataaaagagtggtgctgtcctaccttagaagagcccagcctcctgttggctgtggcttgaggcagggatgcagctgttggtacctaggctacacagaggtgaatggcagctgggagaggaagggtgcctgggatgaccttgtgctcatctatacactggcagggcctctgggggcctctgcctcagaggtgttcttcagagtccaggatgggcaggaaggaaggccagtctgggtagcaagtgaaaagggggagacgagaaatagcacggagcttcttcggtcttcattagagatccatgtgctttgcaggtgatactgaagagagaaaaaagaatcacacactcacacaaatgatgtaaaaaaaaaatcttacaatgatgacaaggagccctggttttggaaagctgatatatgcacaaaagaatcttcctcataaccacccacatccaagtgtttctgtgcctcagaaattgtccctgtttcctgctcttgctctcacctgacagtggcagctgtataccggtcacacacaatgtactgccagcaaaatatgtattgctgggttttgtcatccccaaacaaattgtcattagtgggtaaggagtctcagttgttctgaacttaattttgaacctagtattaaagtcattgggatcccaaactccaacccaaatccagggtattttgccttgcagtgtttcaccctcagaaatacagagatctctagaaagaaccatcaccccttgcctcaggacaccctgaagcaggctcttctaaaaaaatattttgtcttcagagaaaaacaccacgagcaaacacagcatggtgaaatatttgtcatgaaaaaaaaaaaaaaaaaaaaaaaaaaaagaccagcatattgttgccatgtaagcatggagcattttcttgaattttacagattatttcatgtggaaatcatgcttatttgcatgggtagtcgttctttaaaactagccacagatgtacgcctatggagcacgtagatgtttttacaggtgaaccgaaagagatgggagagagtccaagtactccacacgctgcctttggcaatggagcccgttattgtgaagatgtggtctgttaagcaaatttgaagttcaatatcagataaacctggcatgaaggcagtattttcattttcttcataaaacgttaattgtaaacaaaaagatgtgctgtcttttgcatgcatataaaatctggagcaagttactaagtgacacaatgtatcaaggggctttgataaaatataggcaaggatgtttcctttttatatcttgcccctaaagcaatgctagttgacatacaaagaagccatcttcctttctcatatatttgattgatattttatttcctttatatctttttccagttgcttcttctgtttagcttccccaaccccaccccttctccccctttccttggcataggcaataagacctacaaatggtgtgtgtttaagagtttcttagccatttgaagtactgttttggcagattttatcagaacaaaactgttactaaaagatgtgtgtattcttgcctggtccagtaatgtactgttacacatcctggctcccaaaatgtggcaacggccagtctaactttctaacaattgaagccactgaaaggatactgtgaccatgtctaaacatctccttgttgtatgtagacacagcaacagatattatcttcacctgtgaattcactgaccaaaacccatcactgtgctaagtaagcaatactgaacaatgagtatctgcctttatctcagtgcttaacagactagtaatgcctggaagatgctggtcgctatgttcttcccatttcacatatgacaagattgatttttaaattcagtaataaaagtgtgtgctaaatatctgcatatattggagtcttcccttccttcagtgacatgaaagccacagtgctttagagaccagctcttcatccaaatatcacacggcctcaaaatttaaccctgtttcttaagtgtgacccactcgcctcttcttttagaataagactctcaatgcccccaaatttaatcaattgcttgtcagaggctgtgttcttataatctgccatttcttccgaagataaacagtatcattttaggcatttgtgaaagagaatcatattactggtgcttaagcagtttttgcttttttttttttttaatcttaatccatcttaaaccagtggagcagaaatatttaaaaatgtttcatttcaagcagagttcatgataaattgcaataattgtgatgtgccataaatcccagagcctatgcattttgcatttgattcaggattgaggtcaggaaatttggagaaatttaaagaaaatgattcatcagtccttttgttctgttggccagggtcccgggattcttgagctgtgcccagctgacgagcttttgaagatggcacaataactgtccagtgatgcctgaccatgacagcacagccctcttaagccggcaaaccaagaggagaagagttgacattggagtgaaaaggacagtagggacagcgtctgcattttttgctaaggcaagggcaacatttttcagtgccatgaatccccaaggctcagagcaggatgttgactattctgtggtacaacaggcagatggggagaagtcgaacgtactccgcaagctgctgaagagggcgaactcgtatgaagatgccatgatgccttttccaggagcaactataatttcccagctgttgaaaaataacatgaacaaaaacggtggcaccgagcccagtttccaagccagcggtctctctagcacaggctccgaagtacatcaggaggatatatgcagcaactcttcaagagacagccccccagagtgtctttccccttttggcaggcctactatgagccagtttgatgtggatcgcttatgtgatgagcacctgagagcaaaacgcgcccgggttgagaatatcatccggggtatgagccattcccccagtgtggcattaaggggcaatgaaaatgaaagagagatggccccacagtctgttagtccccgagaaagttacagagaaaacaaacgcaagcagaagctgccccagcagcagcaacagagtttccagcagctggtttcagcccgaaaagaacagaagcgtgaggagcgccggcagctgaagcagcagctggaggacatgcagaagcagctgcgccagctgcaggagaagttctaccaggtctatgacagcaccgactctgaaaatgatgaagatggcgacctgtctgaagacagcatgcgctcggagatcctggatgcacgggcccaggactcggtggggcgctcagacaatgagatgtgtgagctggacccggggcagttcatcgacagggctcgagccctgatcagggagcaggagatggccgagaacaagccgaagcgagaaggcagcaacaaagagagagaccacgggccaaattccttgcagccagaaggcaagcatctggcagagaccttaaaacaggagctgaacacggccatgtcacaggtcgtggacacggtggtcaaagtcttctcagccaaaccctctcgccaggttcctcaggtcttcccacctctccagatcccccaggccagattcgcagtcaatggggaaaaccacaatttccatacggccaaccaacgcctgcaatgctttggtgacgtcatcattccgaaccccctggacacctttggcaatgtgcagatgcccagttccacagaccagacagaagcacttcccctggtggtccgcaaaaactcttctgagcaatctgcctctggcccagccactggtggccaccaccagcccctgcaccagtctcctctctctgccaccgccggcttcaccacccccagcttccgccatcccttccccttgcccttgatggcctacccatttcagagtccactaggtgctccctcgggctccttctcgggaaaagacagagcctctcccgagtccttagacttaactagggacacaacgagtctgaggaccaagatgtcatcccaccatctgagccaccacccctgttcaccagcacacccacccagcactgcagaaggactctctttgtcactcataaagtctgagtgtggagatcttcaagatatgtctgacatctcaccttattcgggaagcgcaatatccttttatctttcccccccagaacaagcataaacaaaagtccccaaggaggtcccccctcaaagcttaggtgaccatatatgtcagtgtggtttttggagtgttctgggaggggggagggcgttagttgtggttaggttttgggacttggagacaaggcatcactctgtagcccaggctggcctggatctcctgaggtgttcagatgacaggcatgcaccacaacgcacagccagtaccttcttaaaaatgtagcctttcctattactcaacataataggctatgggagccatgttctgggtgcctctgagtgcagagaaacttaaaaactaactccaacaaccgtgtgattttgacaagtacatgatcacctctaggaactgtctctaaggcaatctcccaacagtgcttgtctctgcctttcttcctgtgtgactttcttgtctcctttcttgagggcagatggagttagggggggcacctcataaatactgaattttataaagacggtaagttttaggacaagaaaatggagaaaagtcagttttcagacctgtgatataatcaaaaacactcactacctttgaggccacagtgtctgcaggggcctaactagatctcaggaaggacagggaagctgctgccactgtgggatagccagggtatggggagggcttgcatcctgtctttaatcttaaaggagatgggcaggtactgatttattctgaaggcattaacctccctgtgtcactgaggtctgttctgtgggtctggggcagctgcctgtacgcatgagtggcctctgctcagccaaacacagaaatcttttgtccgaacacacacaaagcaaattattttggaaaacgagagaacacagctaaatccaaaactcagctgtataaaaaatggcatcttgaatgactcttttccatcctgagcctgactcttaggtagcaatttttaatccataacgtttttttttttcttccacaagtcagtcctttcaatatcttcttttaattttgtggttgtttgtcttttatggtgtgtgtgtgtgtgtgtgtgtgtgtgtgtgtgtgtggcggggggaatgggaatagtagcatttgggggcaggtggaggcatgcctcttgtataacaaattaccagatggatataaaatttagcaattaagttggctgttactaaattgaggattttgagcaatagtcttggtgacagagattgacattttagcagcagagcccactccagaggacacacagcagttccaagtcgccaggatgacagaaatatgctctcattcctccagggcagccattggtaaagtgagctgaagtcacaagtgtgaaacctcttgggccacagggtccagaaacttcccaccctgatgaagaaaagaacatctcaggcaaaggcaaagatactgaggtcttagattcaagtctgagcttgttttctggttcaacctcagattttcaaaaccctagaactcagtgcaccagaaggcaagcctcacggctgtgctctgtattaagagctggcagtgtgttttgttcaaagtgcctggaccagagctgcagggcaggaggaagggatggatggcttgagtagctgtccatccaccagagaatacaatcatgttaggctaatttatgtctaaggctagactccttgtacctcagagaactgcattttaaaacaaatagtaaagttgcagtggcccccaccccaaccccacagtaacacgtgctcatcttagtgaccagttaagctaggtttcaaaatcctgaatgtacacagaaaagcctcactggtaacaccagctttggtgtttggacttggtggcatgctcagacaattgtaattatgccccttttcattagcttggttttccagggagagaaaagtctttggcttgctaagttcactgtgtcaccctttctctctaaatcccctgaggaattttgaagatttgaaggaaaagaagtagcttctgcaaagtgacttttcctgtcccctgctgcactgagccccctctgacagtggtggcaggagacgccagcgttggcctgaaatacaggtttttatgtctggggttgcttccttccttcaggctccatggccttgggcctcttgctgtaattagctattttgtttcccacattttggccttctaacctctggatttctgctctctactccttgtacttgtggctggtcagtttattattagatcaggtctcaggaaaaggacaggcaagccacagtagggaacctgttcccacttaacacctgctccccttggcgtggctcacctgactcagactgttctactgaaccattttgtctgttctgttttagaccccccctcaaaaaaaaaaaaaaaaagctcaagctttgattgataaaatcttgaggaatcacagcaagcaatgttttatttcagtttttagactacaaggccctaggggaaatatcctaggatggtgcgtgaggaccagacatcactgtgctttcaaaggtctttaaattggcatgaataatgtttatttttagaccctcagcatgctagggattgaacccatggtcttgtccatgctaggtgaaaaacctgtccactgaacaataactccagggctgcataatctcccccttcaagaacacttctttcttactccaaagggcattccagtttctcatgaagcagccacggtaaagagcactgctgaataccagcttctcaagtggctccaggctctggtgaacacatttgttatatgtgttcgaaataccaggtgcgctgccttgtagtccttctagaaggaaggaaggaagtcatgatggtgttcaccttaaatggaacttcagtgcacctggccaaagagctcgtgtcttgggtataaaacagtgtgttcagtatctttgcaaatgaacccgcttaatcaaatattaagttttattcaaattcctaaagaatcactagccaattgtctttctttgtgatgttccttgtctctcctcttctttgcatctcaagaaaaatagccttgtgttcgccttccacatttgcatccacccagctcaagcacaaggtggtcagaggaaccattaagagacgcacagctggcggtccacagcctattctctgggctctacatttgcaaagaatgccacaggaatgtttgggattgagaagggaaaactttctaggcatgaattgaagtccaacaccagtttaaaacgatggttgtttgtttgtttgttgagaaaaagtctcactatgtggcctaggctggccttgagatcatagcaatccccctgcctcagcaccccttgtgctgggaatatgggtgtaaagtatgctctctggtgtctccagaaggcttggagggcctcggaatttaacacagagatgaaatcctgaatggctataggaaggaacttaaccatctccagaagaaaacaaaagtcactaaagcagacaaacaaacaaaagaaccctacccagctctctgatggtgtcagacccccggtagagtgacagccggctctattgctgtcgctaaatgagagcttatctcttttccatccactggattttcttgggaaagcctcagagcaaatcagagaagggaaattctttctgtttcttagtgtttagaaaatgggctaaccctcttccccacgtggagctgcagcatgaaacccagagttcagccaggggaattttttcttcctgtagccttcagggcctattctgttgcctttgcctgagctgtccctcctgtggctgctgccgtttggggaaggttatgctgtgcttggtaaacaagccattgacgctcaggttgtttgcactcttaggtccagctgtacccggctccttcttgtgccaagcagatgcctttcattagtttatggatttatcatcttttctttttttcctttttctttctttctttctttttttttttttttacacctggcagcggtctcaagtttctccagttattgtctattttgcattacacatagaattggatgtcatctgtcttcacaaagctaaggctcagagaactgaggctagccgcgtgagctgtcgggacagcgcttgtttgcatcccctcccctcccccaccgcttcacctccttaatatttatttgtgctcattttctttcctggccttgaatggagcttagctcgtgttcagtacagctgtatgtttactgaatctattccatcgtgagtcattgtgcgtgtgtaagtatccaggaaacagctagtgccttcttgggagagcagtcgctttcagcacaagcacttaaaagggaaattaaccaattggtcagttcagattgattttgaggaggggaaaaaaaaaggattatctaactgctggcttttaaatgtttcattaactatttttaatagtttattagaaacgtatattttatgagaattttatcttaattacacaaggatcaagagggacagagacaggttctgtgttctctttgggcagatggtgccaagtatttccaaccggaaacatcttgaagcaaaaacttgagcaatttgcatcagaattatgttttttttttcattaaataaaaagcctctaaattctgattaaaaaaaaagaatggatttttttaaatacaaaaagctaaaatatcttaacaaaatttagatgcatgaaaagacccagggtatttgggcagcccagtgcctctcttagacacatgaccaaacagtttgtcttttgtttgagaccaaatctacaagattgtttgggacttagaatcataggcaggaccccctctgaaagaaaagattagaacccagatcgaagataatcatccaagtttgggctcaatggaaactgttaccatgagccgggagacagcttgcaactctgatttcacttacccatttgggcagatggtcctgaagtgcccggctcctttagtctaatggaggttactagagggcctttcagcttttccttggcacaacaagtatgtcagtcataaattatcgtctttgtaatcattaaggaccttaaacaaaaacacaagtccagttaagctgctttggcttgcacagagaaaaatcaaaatttctttcttcagtgtttattctcagttaaacacacacacacacacacacacacacacacacagacacacacacagccacacacacacacacacacacacacacacacacacacagacacacacagccacaatagctcacttttctatttaaaaacaatggtgatcttatttcccccccttaatagcataggatataaaggaggatgtcctcagaacacattcacagcagcgtgtttggtcaggaggagtcaagagcttatggatattaatttgactatgcatctccaggtccttcctggttcccactgttcttaggattcacagtcctaatggaggtcactgggaacctgctctctttcccaagtgtctacacttacctgacctttcttcctaaggtgtgaaattttcaatgggtagctaacgaagtgtgggacacacacacacacacacacacacacacacacacacacacacacacacaccttcttttctattttccacctttattttttcccactctcctttaagaggaagtctttagaggagcttctaggaaggacccttaattgaccttgtgggggatcacattgattttctccacgtgcatcttcatctctgataaattataaagccattaatttgctgaggaaatggcagggccaggctgcggcacagatgtgaccagagccatcccagctcggagcctgctgaggagtgccaagaatctgagagagaatcaggcagcctggattgttatggttagcctccccttctcctgggaactgtcttcgttgccactgtttacagatctaagaggtgatgatgtttccagataaataggccttcttatttggggtaagtggctacttcattgatctgctaacacacatgtattgatttgttagcccccaactactgtgtcattcccaaaggagttaactataaattcagggtgagcaaatcgtagttggtgctgaaccactgccttaacaaaagcaacacaccacttctctggtgccagactacccctcccaagtttgcactgttattttaaaagaaacagttcaaagacaatcaaaataagataggaagaaactgagtcttgaagcctcactgtgatagtgctgcaagggagaacacagaacgccatgtgtagctttacctaggtcagtgtgatgatctgaggcaaactgcagagtgtaccaaaaagagcaaacagagtggtaacttcagagagggaatgtagctcctaggtaagactcctgcagtggtgataggctggtcggtctccttagcaacaagtgaattgtatggatagcatactggaggcgggcttggccatcctcatcaggaagtagccaagaatctgcaactgaactgtgcatccctttggcaatgcaagacaggcagtgagcattctgcatgcaaggggtccagttagtgatggatttcatagtccatctggatgaccacacagctttcccaggccggcttatggggggattctagacactctgagtgtgtgtggagatgaggacaggaggggtggccccgtttgtttaaccttgtttgtgccttaaccgattcctacatgcaggaagggttatcacccaatcacttgaaaaaggcaaagctcatgttcttttacacccgctacccaagctccaacatgctgaagacctatttctctgatgtgaaggtagggaccgtcttcattgcccgttgttcattgtctgtggatgcattcgcgatctggacccttgggaccgttttccttacccgttgttcattgtctgtggatgcattcgcgatctggacccttgggagtcaatggggatgggagtggggtcgacttaggcctacacctgagatgtcagtggttggcttcagctgcccttttgtgatgccacttgtctatcgacacctaaggttgttccccaagtcacatgcgttaccggggacatccaggagactttgccgctctctttacatggatgaaatctccactggtaatgcctggatgtcccaggggggaaaagaaatccaccccctctgcaacagtaaactgtttctgtttttgttggtttctctgtatttgtgcctctgaaatctaactcttagcacctcctctcctcctgtggaaaggagtgaacactgaaattctctatgcagtagctgcttagaaacaaaagtgatgattgtctcttatttacaacttaatttgttgttgatgcagagtacactgagcataaggagaatgaataaagtgacagattcaggacacattattcaaatgagggtatgaaagctgtcggcctacagctgcagcccctcattctacagaacactggaacctgctggtcccctctctctctctctctctctctctctctctctctctctctctctcacacacacacacacacacacacacttgtgtgtgtgtgtgtgtgtgtgtgtgtgtgtgtgtgtgcgcgtgcgtactcgtgtgtcgtatgtgggtttgaagtcattgttttcatcaacttgaagttgtgttactcatccgtaccttcttttaaaacctagactgggttttggtgatgctaatgacactcacagtatcattatccaaggactctgataaacattacattagctgagattagttttaggggagttgggtggcagccccccaacccttcccctgcctacatcagtgtacacgagctctgatttcttcaaccaagattcccacaagccatgaagatgcccctctcctgaatctcgggcccaaaccaagcctacagctgcatttctgccagtcagtttaggtcggtttctgccacctaatgtttcatttggccttatgggaggagttttgttttccttcctatttgcttctgaactgtgaattaacttgagctttttctctctcgctgtgttgcttaagtaggaggtgtgttctttccctctggacagagcagggaaagtagtctgaggctgaaaaaggctggtgccacagcgggtcaggaaaaggacttggatttggtgggtatcactctaccatagaaccataggctggagcaaatggttgaggactggccaatttttgtctcactcacaggcatgcccagcctttgatattgggacaggacattgccattctcaaagtccacactcaagaacagaggtttagtttagcagtagtgatacacacacacacacacacacacacacacacacacacacacacacacacatctctcaagaaataattttcatgtttttagtaaattcagccccatttacagctgtccttgactgtcagctggatatgcctggccaacctgtcttcggttcccagaaggagggtgtgcacacatgtgtgtgtcttattccctcctgaatcacctcttactgcaatgatctcttccatttttataatattatgacattgcccatatattgttatttagcaccttccatccagagacagaccaaagaactttttaaacatgtgtgggggtgtcactcagcagcgaaatgagtgtgtgtatgtgggggagcatggtggaaaacccaagccattttaagccaagtagcactactcaagagtagatatggtcattaaaaatgttccaggttctgtatatttacatgaacgctaaagtacaaagataaatcttagaagaagaaacttctcattccttcagaatacagctagtaaaccagctgcatgtataaccacttaatctgcccaagccacaataaaacacctgtaaaaatactttatttttcaaagcactagtactcagttatagactctacccatacttcaaccacaccaggagagatggccgctaaagtgtgtgtgagtaaaattgaataataattaccctctgtaacgaaaggaaacagtagcatgtatgacccacaacagaaagccactgaaggtcgtctcgctttcacttttggaatgaattatacatttttaactcttctaattacatctttcaatttggctagtaataaatgaatttgtattccttgagcttatgaaagtgatgcttgggtgacgtgtgcaggaggcaatttacatgacagaacaacgaagagtagcctgcatctctcctaaagttaagcgtgactccaagtctattgagtctctgcttatacacacgcccattgtgctgtaccacgtatgtctacatacaagcacatacaatcccatctgtttctttttaaggctaacaggaataggtattgtgctgtgtatggagacacagtactaagttttatcgaagttaagattcaagaaaccacgtcagaattgagagagccctagaaattgggaaaggggccctagaatttcaacaaaaatgccaaaaaaaaaaagtcctaaccctaatagaatatacttctttcaaattgttgagtcatttccagttcaaatagtgactatgcaattaaaaaaaaaaaaacaccaggggaaacagtatatgcaggaaatatttaatttctcaagtaaggtgttacctagatgcctgtcatagccataactggagattgcgtgttggaggaaggcttctgaaggtgatatgagactgagttaggcccatgacttcatgtctccctccaggagacactggaccactgctggccatccctccccaagtggcctctactgtgaaggcagtagatgctctcagtcacccagagaagaagcgttagaagggaatcccaggcacccagagatgtgcctgtggaggtggaaaggaaagacgaatcttgggccaccttagtttaactgctccagggagaatctaaagtttgtgttctctcagagaatccagctccacccccacccgcctccccttagcagctctgctcatcctgttttcaggcccattgagaacaagtctgtgagtgtgtaagaggtgccaggatggaaggcctctctggcttcccattcactactgggtgattttaatgtacacaccaataactcctggaccactaactacaacagattcggtgtcatttcggctttgaggagcaggcgttcacagcctttcaagcctgcagtgttaaatgatgtatctcgctccctccaccccttgagtcaactgctgcctagccggattaaggtgtcaggttgatttgttttatacatcttttgaccatgctcattgaatatttaggaagtttctccagcccatattgaggctgagatgtcccgtgggaagtattaatcaaagtcacagagtctcgcacactctggaaacacaacctctttattgaagcgattagtttttgcagtaacacattagcacactacagagcttgcctttatagaacaattggtcctttgctcataaagcgctccacagagcgcgcagaattaactcttttaaagttgaatactcttcctctttccatgggaagacctggagagcaggctgcttgtgttttgctcttaggcaggaacggaaaaccacagcacatttcatctccctttcggtgcaggggaaagcccagctcttggagctgtgggcattgctcattttgcctatctcgtgtttggagtctgttgtttctgcccattctctctctctctccggtatttccagcctccaacaatacgctttaaatctccctttatgtcccattcgtacataatggcaagcgcacttacttttttgtcccctccattagggtcattcatgaccattctagaaaaaaaaaatgcccctctatttttttccccctacagtactcttgtccatatgagacaatgtcttgtaacaatacagaggcctaatctccatgtcaaagcaattttcattccccagtgcacagcctgctatcattttgtaatgttttgtttcttgttctaaaagaattaaaaaggaacagttagccgtcacgggggcctggtaggccttatctcagtgtctggaaatttggacagtgtattttactgctcagataaaatggaaagaagtccaagttcagcaaatcgtaatgggtttaagttctattgaaatcggccaccagaagatcagataacgggggtccttcagttgtctttctaatcgggttccccgcaaggctgaatggagacagagcagacgcacagagtgaaaatataattcttggacaggttaagtacatgtttgaactcttgcaagcagaagcgctttgctgatgacttaatcattttctggtcaattatctgtaagggcccttgcaactccacggcaattaggatacaagatggccttctgggaggaacaccagtcccctgcttctgtttccttgtgactcccattctctgtcataaattttcattcacttatcatctttgctagtagagaaacaactttccatagtaattacagccccatacacactctcgctgccgtcttgctgcagcctggatagtctcagggccaggatttgataagtgttccttggtgacttttgatggatgtacacccttttctgggggcccagggaagggaatggccctgatgactaaaggcagggtgtctgtcagcctgcctgatagaaagcagtggatttattggttttaacttggcaagttagggcacacctgtccttttcgagaggaaagcagtcaataaggatgggaccatttgcccatccaggaagacatcttcatttcaaaggttgttgggaaacctgggtaaacagacttttaaagcccaatcatgctatagtaatgtggcatttaaaaaaaatgtaataataaatgtcctgtctctgccatctgtgaactgtgtcttaaccagacctcctagacggcatggccatcaagggggggaccttcccactgactgcagagagcacaggaacaggtgtcagggtctccccagaccacactggaaataaacactgtggacaaactctacaacgaatggattacacacacatacactctcacacactcacactctcacacactcatacacactctcacacacatacacaactcacactcacacacacactcttacacacacatacactcacactctctcacactcacacacatacacttacactctcacacacatatactcacacaccctcacaccctcacacaatacttttacactttcacactcacacactcacacactcacactcacacacccacacacacatacacttacagtctcacacacatatactcacacaccctcacaccctcacacaatactcttacactttcacactttcacactcacacactcacactcacacacacactcacacacacatacactttcactctcacacacatatactcacacaccctcacacaatactcttacactttcacactcacacactcacacactcacacactcacactcacacacactctcacacacacgttttcacatacacccatgcacacactcattctcccccaaccccaccccccacacacacaccatgtcctgccaatgatgaagtcatggccttggtactgatcatcactggagcttggaagcaacaactctgcctaggactctggctccagtccttttcccagcagtagacagatgcatgggctctgctgaaggtagaactatgggtttttctttaaccaaaagaccattggtctaaggaaaacctgacttagaacatgagttttccacttgaagtatagagggcagtggtgtggtttctgtcatcccgtatgctttccgatactctgtgaaaatgtgcattcctgttgccgctgccattttgttggcacttactacttccctttccagggagagcagaaatgaaactttaaaatgtgtatgttacttaagcaaagtcaactaacaagagagtggcggtggtgtgctcacctctctcaacctttatatttaacagttcaacagatgcattacctcccagctcatcaagtggttcagcaatttccgtgagttttactatattcagatggagaagtacgctcgtcaagccatcaatgacggggtcaccagcacagaagagctgtccatcactagagactgtgagctgtaccgagccctcaatatgcactacaacaaagcgaatgactttgaggtaggagcccgtcttcaggctttggtcacctcccttttcattatttattttcatgttctttgggaaagacgctaaatctattttcgagatggtttcttacttaagcgtacacagtaccttgccaggcaaccaggagaatagcatgactcacccacagccattccgttcccatcccccatctcagcttacatggaagacccagttgaccctagtaaagggaactaaaaagtctgaagtaaagggcaaatataagatgatttcatttgtgttctgcggcgtaggctgagctgtacatactgtataccatggtaactgcaaaggttgctacttaagaagtctagaaatgggggctggagagatggcttagcattcaagagcactggctgttctcccagaggacctgggttcaattcccagaacccacatggcagttcacacttgtctgtgactccagttccaggggttctgaacccttcaggcacataaaacaaaagttaaataagaagtctagaaatggcgggggacgactccatggtttccacctccactcatttcctttatcggaggaagtgacatgagaatttactaagcatatttcaaaagatatccagtcactttttttgcttaaaaaattttagttgcattttcatttatttgtttaatgtatgcacacatatgtgtggccttgggtgtgtgtggcagggactagagtgtatgtccactctatgcctgagccacagagtggacatcaagttcaaaggacaacttgtgagagttggctttctcccgccatcttgtgtatcccagcaatcaaactggagtcttcaggcattgtggcaagagttttgaaccgatgagatatcttgccagccctgctttggtttttatttgtgtttgtttttgtggggaggatgagtagcttgtatgttcctcttacatatgggtacattctagatgcatgcaaagcgatacagacaatccccaggaaaccatatcggtgcagcaatgagagatgtgtggctgctcgttggcatttcttcatgggctggtgtggagcctcggcaaacagttttcatttaagtgatggctgcatgagaccacaagagcaagctcccaatgctcacaaaggcgtttgctgagccctgctcatctgggcaacaatagctggaggtgggggtgttgggggtgtggtgagacttccgtagacaaccagatcagctgtgacttgacaaagttgatcattgcttaaatcttctgttagatgctgtgtggctgtgagggcaggaatttgagggaccgtatgctagtatgcatgttttcttcctaaggacccaaggatatccagaaacatctctatgtcaagggaaagaggaactctcctggtctggctttgtctgtaaagagacctgacctgctaacgcgctgtattctcaatgcttgctcatccctttcctgttctgctccccgttgttctgggagatgcagaccagttgcgggcttatacagaatggggcatgcaagcttcacaaggggaagtccgagttttcccttgaaagttcaaatggttatcctgcaagctaccaattgcatctctgtcacccaagcccagtgcgctgctggccacacatgctataaatgaagtttttcttccgctgaatgcattaaaaatagggattcttggtatttagatccactatctttttatttgtttattgtgtgtgagagagatgtggagagtttgggaaggtcagagggtaacttgtgggagctgtttcttctcctttcaatcatgtgactccaacacctccaactcaggtcatcaggtgtggcaccaagtgaccttccccactgagccatctggccccccacccccatcaaaaaacctacgttttcaaagtctccattgtcactgtaccaattgattgtgtggacagaatacaagcaaatgttgccttccaggctgggcggtggtggcgcacgcctgtaatcccagcaggatctctgggaggcagaggcaggcggatctctgagagtttgaggccagcctggtcaaaagcaagttccaggacagccagagctgttacacagagaaaccctatcttgaaaaaccaataaataaataataaaaaaattaaatttgctgccttccaaagctggagtcatgacggtggctagatatttgaagaaatattgtataagaatttagattcttgtttcttctctcccaacactcaacactaggtgctactgctttgcactggtgaattaatgacattataacaaatactctctgtcaggtgcctcagtcttcataaaaaggctacccagtgttcaggagataatttctgatctcatgcctgaggagacaagtcttccaaatgcacactgggatgttcagggcacttaaccttacctgctgaaatgtaatcctttattcccagcacaggagcagagacacaaacaggggacactggcgtcaggaggcacccagcaagctgctccagttagcatcatgcaaagcctctttcccttcatatgataaccatctgatagctccctctgcgagtcatacccacgtccagccaggccacctctcctttatctgcagtctattttaagaatgctctactgccaggagagtggggcctaggcaggaatcctgtcacctctcatgtgactttgggcaagttacttgactattctgaggctggttcctccttcacttataaactacacccccccccaaaaaaagataaaaaacaagaaacaaagcatgggctctttccaggaatgtagggagcaagagtcaacaacatgaattctgtcctgtctactctacatacaaactcatgggcgtgcacacacacacacacacacaccacacatatcacacacataacacacacacataccacatatcacacatacacacacacaccacacatatatcacacacacacaccatataccacacacacaccccacacatatcacacacacacaaccacatcacacatatatcacacatacaacacacacataacacgtacacacaccacatactacacacatacacacatataccaaatgccacacacacacacacacacacacacaccactaaatagtttttaacacagcctctaagtctggcacattgacttacagcgcttcagataaggggtccctccttttctgtgcctttgagcatggaggtcactgcttaagtgagatgcttaaaaagccactgctcttatctctgtagctttgccagtgtgggctgtggctgtgagccaaaagtagccccggcacctcttgctgaatgcctgggatgatagtgtacacagcttcactcttgcgttgaagtttctcttcttaacatcaactaaaacaacccagtagcttcagtatctgttagaggggagtatagaaatgtagagtctttgtctctgcagagttttaaacagagatagagcatagtagagagatagatgttaggggtctataatgctcaaagatccagtccgtacaaaggagtgggctagccctctattagctgctccagccatccaatgtgttaaagattacattttaaaatttctctgaaggctgcaaaaatagctcagttgataaaatgtttgccagacaagcacagggacctgagttctaatccccatcctccatgtcaaagctgggagtggggagtgggagactccaggcagatctctggagctcggtggccatgggcttcaaggctcagtgagagaccttgtgttaaaaataagatgaagaataataaagcaagcctgcctgctacatgcacattcacaaatgtccccacacagatacacacacacacacacacacacacacacacacacacacacacacactttctcaccagttgtatataacaataataaaatagctgccacctgttgactatttactgatgttcctttgggggattcatggccttaacttccttactggggatactagcagtgacaggacacaaacagaacaatgagagcaaagtttgaatggtttctagattagtccaagtgggtgggacccatacaatggacagggagcaggcttggggactctgactttcctcttaggtactaggatattttcttccttcttttctctcacctgctcctagctttggggaggctcttggtgccaccctacagcttgggttctctgtcatcgcttagcaccagctgccttcagtctctgaccctgatggctctgccgatcacagaggttgcccattcctggcctaccaggaagtaaggcagatgaggaaggctgtcactgggcaggagggagtggcttgcagggctctgtcttcctggcctgcacaatcagggccttctaagtgacaggagagcttactctgccttttgtatcagctttcacaatagctgggactcttggcacagtgtccaaactcagggtgttgagagtttgagatgacccaggggagtgtggaagaagacactggaggggaaaaacaccaccacttttgacttctactaaagggagggacggagtctgctccatactccatagccagggcgtgtgatttgtagacacgagcttacagcggtgtgtggaagaaggtgagcagtttcggcagcatctttcactcctgcctctcttgtttaatgagattggcaatgagaaatgcatctttccaggtgtgatggtttatatcccaggcttcgttctcacttcactttgaagggcttccaaaagaaattttttttttttttatgggtagggaaaggtttggcattgtcttccagtttttaaatcatacccatcttccagactttaggggccaatgaagtcagattttattgctttttgtttccccctctactgtgggagaaggaaggtattgatccctgccagtttccaaagctagtttaccagtttgtgaagaattcaggcttggtgcctgacccgtttatctcacaggttaatctcactatttctggagttcagagagccaaggtgttcccatgttgacttgggcggccacctcttgagtgcaactcagagggctggatgaggtagaggctggagacttgaggtggcatgggtagaagttgagaaggaaatgtgataactgtcccctgtcacatgggcccactttctcagtgggtaccataaggtaattccattgtagaaagcaggtgctctcacaggcccctcagtggctagtcaacctgtaggcagagtccaagttcccaataagactgagtaatctctcttggcccttgctaagctcagtctgggggctggaaggtttagaaataaatagaaccaggaacttgattcattcattagtgggctggtaaatgccacttcctacggtagcaataggcatagcatgttgctaggtatatccatcacagagcctgtgggtttgacatttctctaatgacacgtgacaggcaagaggggtacttctatggagttctttatgtaatttctccttttcttcttggacatcaaaaatgaaagtgtgtcttcccccggagaccctaccattaccataccccatactggagttatccttacccaacctgtttctgcttccagccagcccatgcagaatgagtaagtttggaagccttcctataaagaaacaggaagacaggtggattttggaagcacttccctctgctccaaatagatgcttaaatatgagccatggcttggctaattggcacatgactaaaaaccctttactgctattgctatctcttggcctcaaagccaccaagccatttaaacaagctctacacaacatactcttagtgggtggcaaggaagaggagaaacactttcctttccttcctgtgccagtctcactggtgacaagccaaattgatcttttaagagactgaataaatgatccctaaatacacgtacacacatggctgactgggaaggtagttccatagaaagatcacttgggagaggagaggagaggagaggagaggaggggaggggaggggaggagggagggagggaggtgaagggaggagggaaggaggagggaaggaggggaagggaggaggaggggaagggagggaggaggaggaaggggagaaggagagggaaggagggagagagagaagagaggaggaggggaagggagggagagggaggagaggagagaggagggaggaggaagggaggagaggagggaggggagggagggaggggaggagagtagggaagaggaggagagggtgaggagaggagaggaggagagagtgggcagcaggctgcagggggctgaaggcaccctcacccagtgcaaggctccatttctttgctgtttctgagattcaaagtgttcatcagtataatgaagcaaggggcccattgatttatggtctgtttggcaatattgcatttttttagccccccatgtctctttttgtcattgggctacatccaagcacagtgagagcaactttaaaacccccttactcaacagcttttattagtgatagcatcccgtgacctttctcaacattcttaaaggaaaagatagagagtaatgtcgtccactttgctcattgtcctttgttggggtgaacaaagcattttctacagtggctatagcacgtaattatacagccctcaatagcagtgtcttggcacatatcaaagttcagaggagcctttagaaaaaaaaaaaagatgttttgtggcagcctagggagggtctcatctttccttcagaaaatacttcaaggctcttctgtctagctccctacttagagctttttcccctcctgcttcataaagtttaaagggggttcagtggagttctgtgatctgcttcctttgaaagcttgtgcctcggcgcacagaggccctttgacttcaagagttcgtggatccgtgtctttaggtatcatgtgtctgaccttatcagttactccatttaatgtaggagaaaaactctcgactctttgtgtttgtctgttttgcctctgtgagatgatttggtgaaaagaccatcttttttaacacgccaccgagagcccatttctgactgtaacctaccctgtggctctttctctctttaaaaaaaaaattgtccttgtgttttgtgtatggatgagttcacagtgagaatagaattatacaagggcggacgcacacacaaaaaaatcctttgcttttccctgctcacccttccccatgatctgcaggctccctggcggctgtaccccaataggcaaagcatttagcaggcacagaggtggcggctgggttgctggggcagtggtgggctttctcttgctctggcctacccctaaagccttcataattaattgtccttggacgatgagcgaagtctgaggacagtgtggaggggtggctattgtctaacttgcagtcctcttggcctggcttctttctttatcccacaaagggttatcaataggacggagaaagcaagttcccttctgagagctgctggtggtagccacagcttttggtgagatgtagctattgtcttcagtccatcctggattggatgtctggagaagttctaacactacattgaaagccagcctgagtatgtggcctggattaaatggactcacatagcaaatccagagttttctgggacttgcccccgcctggatgacaacttaaaatccaattttctcatcgtcctccacagggtagtatttagctttaacgacttgctttcttgtcagtcacagggcacaatgtctaaccgtcctctgctcatctctcttcagtccacccatatgagttggcaacacgatttcacaaacagcctttttgggtgaaacatcggagtttaattcttgaaagtagattattctagttctaaaatacggtctcaccctccaagactgccttaagccaacctccagggctgtttggtaacatgacataaaacaaatacaatctgctccccagcccctccctcttttggctgaaatacaaagtaaagatggaagggtgcaagcagctcctgggaagaaagcaaggctctcaatggctgatcattaggctggttttttctattaactagggtgaagccaagaaaaacaaatataaccgttcttccaaagagttgaactagcaaattagtaaggtttaaaataacggcactgcagagcatgtggcagcttcgaggccgacgggtccccgagagtgattctgtttggatggacaggcctgcaggatggccactgtagactccgtccctgctgctctttggaaacactttcgtagcagaccttttagtatttaaggagaacctgaatgtgggcgttgacacaagtaatgtagtcaaaccaaaaaggggtcataaaaaattaaagttcttcctctgaatatttcatgagaagctatgaaaagggacactggtgtaggagtcctttatgcttagacttcttcttccgggctccgagctattgttctttcaacctctcaaacagactttcactttcaaactgacaaaagtcacttaaaagccagacagctgtactaacacacccaccttactgagagcaagagccaccagggcaggtgacagggcctgctgggagatcttgtttaaaacatgaacagggccggtctgccttccatcccatggttggtcattgcttttgccctcagtgtgaggttttatccctttttgttgctgtggtggtggtggtggtggttaatttgtgtcctaccccctcctcacaggttcccccaaaatatttcttgtgtgttttcttttcccttatgccttaggttatgcccagagtcacacacaacagaagttgcagatattagaggtttgctccctcaactctctagtgttccatctccctctgcctgtctatagtcagcctctgaagcggttcagatttcccttgcctcattaatggtagctggaattaggtgaaaacccaggcagagatggacagccaccccacctgggaatttgagacagggacacgaagccccccccatgtcccagccccacccccaccccggggaccacagtcatggcagccatgaaaagtcctctctctgtgtgtattccaggctccctcccctgtcaccttgtgtacagtctggtctgtgacactgatggtgattatgtcattattttgctctgggggccctggcacatctgcagagccccagcgcatctttgttgcactggcactcgtccacactgcaaatgcttcattagccctgctgccggcctccttgccagacgcgagtgcccaaatccaggcttctttctgctccgttcttttgtgtgcctgatgagcctgtattcgtcttcctggttcttccccattttccttgacttctaaaccccagatggcccagttttcttgcccagatcactcaaagtccacaaggaggagcaaggtggcactttacccctgaacctacccccagccctcaccacctcagctgctttttcctgctccccacatgaatagtgactttgaatgactcccccaccgcaggactcacgttttgttttttgggttttttgttgttgttgttgttgttgtttttcaaacttgcaatttgaaaagctaggcagggacccttctagtttgtggtggcaggcaaggttagcatgagttgtcagctagctcttactatggaagtctctctcttctcagcccagcacaccccctttcatgcctcctgtgtgcttcaccttgctttgttttaccagttatcagaatgctggttatattgttaaacgttcccttctatacaaggggctccgactctttgccctcccccacccccaccagtatccaccacccctccttctgcaacagctccccaaaccccaaacaatcacctattattagatgcttgaagtgattaaggcttggctgatggggaaggagctggttctctttacttctagaaagttctatgcttagcagcgctgagcctgtgaaggtgtgctggctcctcccccagtaaccacactccatctcagagcttaatatcttgggctgtgatgacgattatataattggtatgtttaatttccccttaaatttgaatgaattgatctgtgttcttgtgtgatgggcagcttccccattgagatttaaccatttcttagcccctaaacagcgcggcatgtcgccatgtaaatgtctctatgttagcaacagcagcatacagttctagtttaaggtataagtaaatgagtcagatttttgtggtgctcatggtcaaaccgctaccctgaattctaattcagaatcttagaacaaagacttcggtaaagattagggagaactctctccaaagaatgagttgttgtattgtactggtttccccagacatcccaatatattccaaaattgggcacaagaatatgcatgagccctgttgcgaatattcatgaacaatcctgctgacaaggtgaagagagaggaaatgggagagatcgatggactacccagccccatgtcagtcctgggcaggagcacctcgggagggcctggtgcctatcgttgattgacttttccaatgtaccttctgagatcagatcattttggttttatcaccaagggctcgtggaaaccctttaaaacttaacctcattatcagactataccgcttctcaaaataatcattctctaaatttacacctgctgtgaaaatagtctacttttttgacggctctgaaagtgactcccttgaagctgcagagggacagatcttggggatttgtggacagggtcacagccattttctttatttcctttctgatttcaaagactctgagcatcattccctggtagtctcacctctacagattaagcagcgataatcctttttaaaagcctaatcacatacagtcagtgggcttccctgaccattttagctgccctgtgcaatgtgtttctgcctggtagtgttattcccagggatgacttctgagactaaagcagaaggcagaattccaggtgtgggtggccatgctatggttcagagactgtcccttgtatatacgcaatggcactctattgactgcttttcggctttatccctagatatatccttaagagatatatctcagtacctgtatttattttctcatgttggggaccaaacccagggccttgtgcttgataggcccacactctacattcctaacccctcagaggttcattggttaaagtgatcccactgactgtatgatcaagctttgaaaagggattatcagattcttggcaagttctggcaaatggagttgtgtgcccaggacatgtccagtggtagaaagagtggtcagacctaccctgctacccatgtgtcctcagagtgtttataaatgaaaactatggtatttgaccttatgggaaacagccgtggatctgacaaagtggtgagaaagtgctggcttctctgtacttggttatgcgtagcgagtctatttacaagcaaccattatttcatacacgcaggtatggcctggaaatcttgggaaaattctctggaaggatgtctatcatagtggtcctggcccagtgttaaagcagaagtccaaggcatacactctgtaaccagtcaagtcggggcctactcccagctctgctgcgtggtagcttagaaacgttggcaagggtctggccctctctgtgctcgagtttctcatctgccagcagagatgcaatagtgcgtactcagggttgtgagaatcggtcgcacccccacgggattatcagcacacagtgagccctgcagaaaccccttcttttattggtttgtggagccaaaggacccagggagaaagaaacgcaagtggagacagtgcacagctggggaggcagatgagactaaagagtagagatgattccagaactagggaggcagagaggcctttccattgtagcagaactgggctccaggttcagctaaagaccctgtctcaagggtgggggccgtgggagagggagagtgctggaaggaataaaattcattatgcaaatgaatgaagcttccaacctttctaagactcggtggagaacaattgtagacgatacccgatattgacctctggcgtctacacacacttgcacacatacacacatacacacacacatatggacaatagcccaattgttgcatcacttccttctgtccctcaacagccaacaaacagctctcctcagaactgggtccacttatcaatagaaagaggttcttccaatcttgtcctagtcatggctgtgaaggtcctgccatcctgggactacctagggactctgagaacctctgtttcaggagaagggcagaaaagcgacacagggggcttcaggaaggagagccagcctgcaggtgcaggctctggccatgctcacctcccctgggcttgactttgctcatctggaaagggacatgagtagacacagctttgttctgaggctgcaatgtcacgactccagagtagaggacatccgacattctctcacaaaggctgctggagccctggttgtgctgcacagccaggagctatgagtgccgaggccctgggaatgcagatggcacccacttggggccacttctacccatgtgactctgcccagcttaattatctcagtgagtgtctctagggtgctcattttccttccctcccaaggctgccctctcagatccaaatccacccttagagatgaggaaattcccttattgggatgatagagactaatttttcaaattgataaacaattgattgactgacttggcacagctgcccttgctgctcacttggttaacctggctagccatacaacaagacagcagtgggggcttcatttgggtttctaccatgtggttggatctgtgtatactagaaagagctgtaggcctcgacacctgtacacactgttctatacctcccttcctttaaggaagatttagcactatttgaggtggtctgcctctactgcaaggcatgatgggtaatgctctaaaagcatctctgtcttctccttgaaagaccattagtcatcaagaccggcagtgggcttatttccctgtgcggggtgtgttgtggtcaggcaagaaatccccttggatttgcacacttcacattttttaggaccagtgtgcccaacgtctggttttctaaggctagcttaccaccatttttgactcagatctgctactgaagatgactgttaatacacagtaggatattcactgagagcaggcaaaggccaagaaatgaccagatgcccatgtgagtgggggaagattaaaggttctggtctcagggtcactttaattcagagaccattttcaaagatctgctatttcagtgacttgaacatctgtgagctgatctgtgtgcagatatctggatgtgctttgcagcaaggtacccaacatcatctcaaatccccttaggtattggaaggaggctccccagtcccctaatgctccctgctttattctagaaactctcccctgcttctccaacccatttcttgagagagtacagtcaccagaagctggtacatggctctcagaggacaggtggcccctcagtgtctgcatgaggcagacggtcagccgagctcagggtcttcacagatgctcaagttccctgatataaaatggcatagtatttatatgcaacctgtgcataccttccttgtaaactttaagtcatctctacgtgatgtcgaactcctatcataatctcaaggctgtggtagtggttcctaaactgtattgctcagtgattgtgttaaggaaaaaaaaaacaaaaaacaaaaaaacaaacacaaaaaaaactatgcagtattcaggggagatgcatttgttttttgccagatagctttgatctgagtttggtcagctctctggagatggaaggtcaattccaaaagttcaccttcaatctgcagagagtagttgtgaagtaaagaccagtggtattccccagatataaaaacaaaacaaaacaaatactctctagctgaacaatgatcttgtagtcaaaatcaagtgatggaatggaggctgctaacctgtccttccccacaaacaactccccaattatttggggtatcttacgtcattgccagtggaccccacaatgggtggtctctcagctgctgattctcaccaccgtgtcaatgccttccctggatttaccatgagcaagcgctgtcctagcatcttcctaggaacttcactcatattgttccatccacaggaacacagagcaagcagaccaggtttaatgtcgacctaagcagggcttacttatgaagggaaagctgctactgaaaactatcgcgcagtgcgttctccggcagaacaggagtcactgtggactatctatgccccagcctcccttcgcacaatatcagagcatttaggccgtgttgattttggataatcttctctccaggaatggcaccgattttggctctgtttgcttcaaccacctcagctggtaatggtcatgatagttaacctcaagaactcctgacttgtcttgacaccagggcacctatcacaggctgtcttgatgtgtagtttgttagcaccacagcgcaatgggtgggcagccttcagtgctgaatttcccgtctgaatatggaagcgagggtgagatgtatcacgaagcacacggtggctctgcttagcgcaatgaagcctttactcatgggaaattcttaatttcctaatcaaagcagggcagctgaaccacttcagcctctgtatggcttattacctcagtacccatcaatggggcagccttagctacatcggagaaatggtgagactttgtagagtgaatccgggtgagtcaagccaggccctccccaagagcaactgctgagcttacaggattagtatacaagaaaggaacattcagcatcaagaaatatggtagacctcaagtctggctttgaagaggaattgtcgaactgtgacccatgtgccgggtctaactgttagtctctttttggcagcccctgtgctaagaacggcttttgtatttctaaacagctgtaagaaggaggcttacgcttctgagagccgccctttatcaatgttgccaacctctgctgggggccgctctccttattggaaacatgaagtaggcggagatccctccagtttctgacctactgtttgatggtgtcatctcggtctagcctttaccatcataacctaacaggtgggcagtctgggcagagtgtttccactggtgtctcagatctcagaattctctgtcacacctttaggagatggaaggagataacttattttagtttttgatgccttttcttgatgtttgttttattttatcagttctaactcagactcactcttttgagatatatgaatgaagaatttgagaaggaaggaaaatttacccctgcccctagccaatcacaacaagtatggtttcctactgtatcacttcaagattcccatgggggagcaaataaagtggctatttcaagtatgtttgaggactgaatttcagccccacaaaattagtgtggaaaaacctttaaagacgtttccattctgttctcaggttgctagaaccaacttttccaggagtatggaaaagatgagtttattactttcttatctgcccatggagttgacagcaggatgtgtacatagtttaaaatgtatgcatggattattaccaggaagaaatgatggtaaggtatattttctattaccccgaacatagttagtgagacgctgccctttagaaacctatttctgtgatggatatgccatcaacattttaaaaatgtctaagtttcatagtagagctcagaattttctaaatatatacattttagaaggcaattatccttcagataaggaaacaaagaaaatgcccaggcgtttctctgctgttgtccatgctgttgtgtggagatgtcagtcacagctacaccctcaacagccaggtccagtccctctgatcctttcccatgggattttactgaccatgcagggtggatcctggcctccctccttggtctccctgtgactgctcctttccacaggctgtgacattgacaaaggcgggggtgctgttggagcaagttacaggccttgcctgagagtaagctgctgccacaagcccagtgcaaatcattgctatgagagcacacaaatgggcatgctcccctttggccagcttttctaatcacctttgcagctctttgcatctagcagagagaagcctcaggctttggagtaaatggggactcctgttccttcctggggccagggtccgatccttcaacccccacagcccctcccacgttaacatggcactgcctgatgagtgtgggctgggagcagcttccaccagctgaaccctctgatccccagctcactggagagtctggctttgggattttggcaagaaggcctattgcccatggggtcagcatgaataaagatttctttcttcctttcctttttaaaagtcaaacatcaactgaaactcttcccatggcaccctctgcccccctcccacacaacacacaacacacacacacacacacacacacacacacacacacacacacacacacacactcttaacatttcctcacctgagaaaatttactctgtgtaaaatttgaacaccaaatccatcttatcattttgaaagtgtgtttatccagctttgtactagggacagaccggcggtttcaaggccacatacttttcaaaccttggttgcaacacgtttgcctcattttgaaactgtctttatccagccgaggaaaaggaaaatctatttgacaaagtgacactctggccagtttatcttgtaatatggctttagctcactgagtctattgattttcttaaattaatgtttacagaatgctactgaattttgctcaacagaacattgttcttttgtagctttgttttaaaataaaggtgaggggaaaggagggaggacaaggcgcaggccattacatcatgtgttcttttgcttaaaccaaggaaacacaggtttttctctgcatgtgtttttaaaacattttcctgagagtatctatccttcagatgtttaagtcgctaaatgtgtagttaggaaaggggttcactcttgggaccccacattacattagtattaagttaattgaatcctccaaggtacctgaaagttgaatgtcacctgcagcatcaaagggaattagtcactctggtggctgcccttctcctgaacacagtagagtgtcctaagcaaatttacatgctattcagccctttggtgagaccttactcttagacggtggtgctcaggtctaagcatactctctctgaagatggctcataactggcccttcctgggcaccacaggaggtgagactttgagtcccacacagcatctttcttcatttattgacccagccaatcatatcagccaagcggatctcctcaaagtgtctcttgaaaccacgatttgcatgtgttccttatccatggtgagacacttgacgggagtcaggactccttcaaagttcctgtccaccgtcttacatggacatgctctcttgtgccttcctacacacgcatgctccctgaacagagaggctattgggagagaatcccacgatgcaccattagcatcctgtaccttccctcttcgggaaggccgtggagtctgggctgcccacggagcatatgcatggctggcatcttctgaccatatttcatagtcccatggtttatctattctgcagctggcaggagttagagtgaggcaaggacctgcaatcacgtctctgttctgcttttagagattgtctatctgacaatctctgtgaagaggaattgaaacatctgagtgtaaccatgtaggtccactcatctatgccgtccatccatccagtgtccactcatctatgccgtccatccatccagtgtccactcatctatgccgtccatccatccagtgtccactcatctatgccgtccatccatccagtgtccactcatctatgccatccatccatccagtgtccactccgtctatgccgtccatccatccagtgtccactccgtctatactgtccacccatccactctgtctataccgtccatccatccagtgtccactccgtctataccgtccacccatccactctgtctatgccgtccatccatccagtgtccactccgtctatgccgtccatccatctaatgtccactccgtctatactgtccacccatccactccgtctataccatccatccatctaatgtccactccgtctatactgtccacccatccactctgtctataccgtccatccatctaatgtccactccgtctataccgtccacccatctaatgtccactccgtctatgcagtccacccatctacatccattctgtctatgcagcatgagccccagcttgcgtcactgctgtcaggagacaggtttctccttgatcaatatttacttaacaaacagcagggatggaagagtttgtttagaggaatcgtgtgcccagcagggtgaatggctcggaaagaactccagtgtttgtctctttcctgggacctttgtgtgccaggcatgcacatacatggggcagatagatgccctttttctcctgaactctttcaaaggcattcagaagtcatctgacaaatccttgctgtctatgattcggacagtgtacttgatgtaaatatacatgatgtatatttagttttggagaacattctagagtctggttttctctccacacgtccatgcaggttacacactttggaaaagggccctgggattaattaagagtacatgcatcttgtcctaaacccttccagataagtagaagggaagagattgcacacaaaaacaataaaagtagtttaacaaggatatatagagagatatagatacagatagacagatagacacacacacacacacacacacacacacacacacacatatatatatacatacatatatatatgcatgggataaatctatggaaacatatacttgcatgtgtatatattaagcccccacgcccaggaggctctgaagattttcagagctgcctagccagcctgagcctcagatgtgtttagctctcctcgtaaatacaaattcagcagtgctgaagttgagaccacttttctttcaacttcactgataacaattgtttgccagctccagtccctgccttcaatgcagggtgacttggaggcatctgggcctggtttgagacgttttgtttgagtgaatggggaggggctgtggatactgggggtgggggagttatttatttatttgatttggtgagtcccagagttgtaaaaagctgtctgaaatattcatgcagagcggtctgagaagcccgtttctgttttatttactgcacagtagagcagccacagaggattagttctacaatacccgtaacaaaagcccaacagctgatgcatgtgatgttaggaggtgacaaaacagttaaagtatgctgctggctacggcctgccgtcagcagatgcagacaaaagggctgtgacaagaataactctctctccaaggcgagcagtgaagagtatccaaaatgccagcacccttttctccttgacattgtcttcttgcagtcagcattttattgcccttttatagtattaaaaaaaaaagtggagaaggaagaaaaaggaaaacccacacacaaacttaattcacccaaacacacggcagtgcgcccttccccaccccttagccgctcctgtccatgcttactcctcttccatttttatgttggagtgtgaggggaaagtgtgagcttagaagatagtgtcaaaaggtcttccttactaacatcagaatctattgatggactgaaccggccactgggctgtggttcttgggagggctagggggagaggcaacgcctggcttgttttctagccatttcagtaaagacgatcccactggtgagctgaggccagtgggccagtttttgaaggggatcaagggtggagaagtgtccacggggaccccagcaaagggcagggttacggtttccccgcaaaaggctgatgaatggatgcttcagaggtgtgaaaattcagctcctctgtccccagaaaataggggaggctgtcgtcttcttttcaacctttgtcattccccttctattctctgtgacattcattcagctgccaagagcgtttggcaaggtttgggccatcgagcacacttccagtgaccgctaaccttggtatgtcctgacacttatgacaagtgtctgcaggacacagaaggcaggcagcctgctatgtcaggctttcattatggactgcggagactagggacagccagtttaataaaacaaatcatccttgaaggtaaagcaactgggaagaggaggaggaagacgggagggggatgtctttgccactcaatcggatgagagagagagagagagagagagagagagagagagagagagaggagaaaagcagcagcaaagcatccagcacccacccaccccactgcatgcgtgtgctgcccagctgtggacccagcaggtgcgaaccactcctcctcccattctcccaaagtcactggctcagtctgatcaataagcaaatcattgggatggaattgatgggtgcttgttggccaactcccttcagagagactggtatattcaagtacctcatcaccccgtgtattctctaaatgtcaaggcaagaccatttggggtgaggctcctaggccaggatgcctttttatcaaagcaaagtttccactctcccctcctgaagaactccgggccaagcagctcccacaatagcctcctcgttctgccaaagactttggaagccttttgtttttcccctgtggcatgtccaaaggcctggcctccccgctcccccgcccccagcagcctgcattgtcttacattccagtgacttgattgactgttgcacctgatgctgaggagagagactcgagggttcattgtacagattgttgggttctattaaaagaagcctagataagggattacttgtcactaagggcttttctgcagatgtttattagtgattggaaagccattagatgagagggggtgcacaaaagatggacaatatcatgttcctaccctgacccctgatgccctccaaacatcaggaagatgttaccttgttctagcaaataaaggtagagaaaggtggtgatcagagagctgaggctccctgttttcctgggtgaggtttctacctgtgggtggaatccctcggcagtctctcagaatagcactcgtcaacccacgctacctctggagccaccaacaaaagatgagctgctccagtgtcagaggatctctccaagaagcctttcacccagcacagggctgtgtgcacactgcccagagcaggcaataaattagccagctccttcatttgtgcgtggagaagataccggttcccaataaccagcctgcagcacactttcttaacccacttctatttacattaagggcaaggacttcttggagatggttttctgcagttatagatacatagcttgtcaggaatttgttgccttgggtgagtcaacctgcctttatacaaaccttaaagcctggctggggtccaggcctgtcatggcagcacccaggaaggtggaagtaggagggttggaaggtcagggccatcttctggacaacttgttgagtctcaaggccactcatagagctacatgagaccctgcctcaaaagataaaataaataaaagtaaatagtgggaaagcatgcagaggtgttagcacccagcacgttttagtgggaagatgccgtggttcacaaagctcacaggcatctttatcccatcccagagaatctcctaggatttttttcatctataaaatgatgttttctgagacccatgttgctcaaaattttgttttgagtagtggtgctgagtatcaaatcaaggacctcacccaggccaaggtaataaatagcatgcaggacctcgcacagaccaggcaaatagcatgccattgagctgtactcaaatctgggcttcctgtcctcaaagcattgaagaagaatatcaggggactacagaatattatggaataaagcagagaggtgaggtcttcttgttaatgataacaatgtttgtggaataattataaaaggcgtgcctctgaactgtaggtaaagggagagagagacctggagtcctcagtgaaagacaccttatgttgaagacacttagaccagttacaaggaagtgaaaagccagacacaatacaaaagctgtcacagggcagctggtaggatgacctcaggaaacgaatgtttaaaacaggacaagacccactagtccagcggttctcaatctatgggtcgtgatcccaaaaataacatgggaaaatacagatattgacattatgattcttaacagtagtaagattacagttataaagtagccatgaaaataattttacggttgggggtcagcacagcatgaggaactgtgctaaagggttatggcactaggaaggttgagagtcactgatctaagctaaggtcactgggaaagtgagtacaggtgatacaatctctgaattcctccggaagtcacccttactcctccagggcttgtgttcttgtagagttatctagacagttctgctcctgatagtttccacaaggccttcctccttgcccctggttgtgtgagcattggtggtgggagggatccttggagtgggtgggacttgtagcttacccactttctctagagctcacagctgtgtctctaagcttctctctcctgcagctctgggcttgttgtttgagaaacaccgttttccatggagttctgttgcaaacagccagtgagagcacactgctttgcaccactgatctctggttcgtgtagcatttggctgcagacctgtgccccagcggtgtgtcctctctcagtaatgcccatttgctatgacttgtcattgggtgggaactcgacactctgtccaggaaatccgccatatgtgtgcaggtgcttccgtgggaatctatgggggagttgtgtgggttcttagactgttgtttgcccagccagggagaagggggccctcggtgttcttccagtaggctctgagctctgtcctgacaggccaaggaaaacgcctttgggagagattgctcaataccctcctctttatttctgagacagggtctcagtgtagccctgactagcctggaactcacagagatccaagtgctaggtgggattaaagatgtgagccactctcctttccttttctagactccatatcagggctttttctttctttattctttattcttttttttttttttttctgggaagttactagatttccctaaagaacaattggcttgctattggaagcaatgagctactttgtccaattttaaatttgaaatccagggacatgcagtgattttcttagttttctgggtcatctgccatccacatgtgtgtgtgtacatacatgatccatgcacatgttgagaaaaggcaaagaagatgttggacttgctcacagacaataatctccctgctgtttcaggaacgggcacttctgaactgtggcgaagggttttcatgttgtgtctctgaggatgaatgtgtctacacacacaataccatgtgtttatatcctcatacatgtgaacttaacgtaaaaataagatctcactaatatgtactgggaaaattatgactttgtgtaattattccgtgacgccatcatgctgatgtagacaaaggtaggccatgctttactgtgagttacttctgaagaacactaagtgttctttgtacagtcaagaggtcagactattcagtcaacaagcaagagaacacagacagacagctctcgtactttaattgttatggaagcaaaggcttgacaaatagaaattccaaaaagattatttggggcctgatgaccttggaatgaccttgagtggctccttttgatctccctttgccttagatttctccttgtgtaattgagataacatcttacacagaggttggaagaatggaatggcattcagtatataacgtaacatggtgctcaattcagttaacactaagtactagttattataacggtgattggttacacaaaccaccatctaaggaacaatactaatgtccaagcaaatgtagtaatttggggttcagctttaaatttcacatctcaggacttcctgttgtgatcttacacctttatagtactaattttagggtttcttcattgaagataggggtttaggttacacagatgtccaacatttatgactggatgctaagacacatttttttttttcccataatggaagtcaaaaggagagaggaatcaaattctaaaacaggagttggtgagtttcttctagaatgttctacttacccacatggggatgtgggcctcctttctctacagtggtgttcacagagaaaccctggcactggcaggcctgtgtgtatccttcgcacaaggctctcctgagagccatgaagcagccgccgtctatcacaatgctgctatatataacaactctacataagggaagagaggctggccatttttagaaaatgcaggtgccgtccaaagcccctctctgggagcacggagttagctcagtttcctttgaagaactgcagacttgaaactgaaaactttattaataccattgtctccttggatcagcaggttccagagagattcctggaagttgcgcagatcacattacgggagtttttcaatgccatcatcgcaggcaaagatgttgacccttcctggaagaaggccatatacaaggtcatctgcaagctggatagtgaagttcctgagattttcaaatccccgaactgcctacaagaactcctccatgagtagagattgcagcactcttttgaatgtatgaatagcagtcccccttggatgtccgacttctgtgtgtctagatttttatttcatatatatatatatatatatatatgggggggaggcatgggtgtgttgtgatatcagctgggggttcctgctcatcccctctgggtcccttttcttttcctcattacagggggatgggtattttccttctttgcctttagttacttttgcccaaggcccttaatatttggagacttgaggtagggttgattttcaggaaaagggaatgtcagcctgtgtaaagtctacaagagccaaggacgctctgctcacctggaagcctattggaaatggtggccagcagagtgaccccctgactatgacacagcaggtacctagacctgtgaggtatctcttgtttctagggttaagatgttctgaaagagcccaaggaaagcacttcccacactggaataccttgtttgatttgagcccataagtaactttttcttacacatttaaaccaatgccagcagcagctgggcagctcacatctcaaaagtaccctgaaaggacagatttttagaacgatcatcctcaccaagcgttttctaagaaatgcatatattccagactaaattctgtataagacccattctctctagatgagactgggactgtgtgcaggtcgaccagctgtccctgaaaactttatgacaggtgcttgatgaggtgcttggtgagtactcagaggtgtcgacttagagaaaaccttgtgctttgtcttcattttctatttattttgcttcagatattaaaaggcatgtaccttcaaatgtatcctttgcttgactttacatagcattgctgttgctttttaaaccttttttaccctgctaaaacactaatttctggatacctttctgcagtaagtaattaagaaatccctctgaccataaaatccttgcctactcttggagcgtgttgctagctgctagtggacctgaccttcaggtcccgtgaggataccgcccaggaatggctcatttgcatatggtatgcaagggtggtaatccctcccttcactttggggagaatgtcttaaagtgactgactgatgatgtctcttctacttctacttcggaagctaatagtgatcaaagtgtgagaagcagacaataggttagtttggggttacccaagatgacacatgatttcacatactgagaaagctagctgctattctacccattctcaaatggtcgtcgccgttttccccgcccccccccactggttttttgatgatgtactatgtcctatgcttgcatttaaaatgctgaatattgttcacacttgttttcttggctgggttttttgtgtgtagatgcagtgaacagcactgtccactctaatagtgtggtccaggccccttcttccccttagataatttgatatacacactctaaaaacaacatagtaacagatctggtatttaaagcataaggaacagaaatgccatttttttcattaattttcttttaaaataaaaatcagcatttgactttggaggatgcagttgagcccttgtgcctgtctagctggctggatcaccgtaattcaacatcatttataaattctgctgatggacaggaatgtatgaacacaattattgtcagcacaaagccttaaaacctgctgactttaagctaaacagtgcagccctgcaaggcccagcatcttccgggaggccagaaggccccagcgatgaggacagagcgtgcaaagcatggtcaacactgaccgttcactatgatggcatctcctagggctcatgcacccaggtgttcatatataattattaagggtatatttattatttttctgtgtatctttaaaacaaaaggcccaggtaaccataccagtgaaataaacgctaaaaatcaaacaccagagtcgggagctcagtcagtacgaagtatggaagtctgacatgctttgtctagggagttctgcaagggtgcagcaggatcctggctattctgagtcacctgccaatcgaattcccaccacattaccctttccaaggtcaaaggcaaagctgcaatatagtcaccaggatagacagattgctaggtatctttacaatctggggcaaatgaatattgattctagacttacttggatttttaaactcttgtttttctctgtctttctaattgaaatagacaaatttagcaaaaaaaaaaaaaaaaaaaagaaaaaaaaaaagaagtgtgttttctaatgaatgtcagtgcccttatgtacctagaatctccactcagtgttcagtagggctgtagatgatttcacagtcagcccgggacagactcgctctatgctggaaggacgtctccacagctttgtgttgaggtggttgctcccgatacagtcatgggaccatatgtctcccagtaaaatggtaaaatgccacaagcctgtctcttaatgctcctattaagccattagtttttaaataaaacaacaacaacaacaacaaaaatatataccacctttcaaatatgggttcagccctcaccaagtgaaaactgttttgcgcacagagaaagttaacttttcacagtgggagattggggaccaactctaaagtctgttgcaattccatatcaccacttcttttatgctaaccctatattatttttttgcgcatacactcaaggtgatagtctgtgcctagatctaaaatgcaccagcgcagggatttttaaaatccttcaaaataccagttctttccccacaagtacaactgttcttgtgccttctgtggctttctgtttcatctctttttactttatttccaatgactacagctgcaataaacactagatttttttttctggctgtttgacataatgttgatagctatgcatattttgtgtctttttaaaacaaagcgggagaataatgtttttgaagaagagaaatttttagaacagtttgatacaccgcaaattatttttttcctcaattgtttgagcagcattcgagttttggagattcttgtagaagccagtttttttgtatctgtggtgtaactcttgtgttttcttagcctaatgagaagcactatagaagcaatatttcataccatgtgcaatgtgtgtgcagatgtgtgtgtgaacacacaggcacacacatgtaaaaaatatacatatgtatgcgtgtgaagtggaaagcttaccttttcttatctagatttaagaacttatttcaggcattcgttatgtttgtgagaagaatgttctatttccttctcaccgtctctccggctgttcaatggagatgttttgcattaaatggtaaaactatgtggaagattttaggatatagtaattatttctgtaactgttcactcccatattcctgaggtttgctttgtgcctcgagtattacttaatcgaagtgttttatgtttgaaaaatcctggttattgttctaggaatatgggtgaatatcatttttaaaacaatttcaaaacatcaaaacagaaacactaaagcaaaggggaactttttataaggaaatgtaaatatttaaacctcatggccgtggttatgtaagacatgagattttaataaatatctacagtatcacagcatctgttgaatttattagggactctacagtgactgtacaggcagttgaaagcattctcaaaaatcctgttctctacttgcaaaaggtaacagtctctatcagatgtcaagggcaagggtaacggtgtccctgtaaatctctgatgtttcttttctgtgtacatgaagacatttagtaagtaacctcccacatccctacacacatgcagggtgacatccaactacttagataagagttctgggggggagttaaacacagacttctcctccaaagtgaccacaaattaatcaaagagtggtttatagaatttccccagagcagcagtgtgtgtaaggacgttaacaatctttgctgtgtatattatagagtactcattggtgtgaacagcacaaccatttcctcctggtgtaaactcttgtgtctgcaggttacagcgtcgatttcaaaggctcccgttggaaaatgcaatggttggtgtgtgtcgctgcatcgaacttgtgtgtcacatgcaaggaagcgcagctttgtctctgttggttctaaaccatctaaaagaacgaaaactaaaatgctcacctttagagctgggatccaaactggtgtttaatctttgcatcctttgaatgacccttctaaggcaggctacgtggaagcatgtggactttgagtcttctcaattgagctcactctccaatctgacagcccctaatatgcacacatgtgaacaggcaggccaacggccatcctgccaagtgaaaatggattcactagatatttttgtaataacaaattcctctgcctatgagggaataaagcgttttaaagttgtatattgccacttcaaatttagacttaggaaaaatgatgtatttggagttggtctcagctccctagaagagtcaaaggtcacagcttcccccaacattgtcccagccatttctcatatgtatatagtataaaccgtgacaaacactgcctttatatgatttagcaatatgttgtaaatagcattatgaagctctttttttgtaataaagaccctttgatttgaatatagtacaataactgaactgataaagtcaatttttgattttttttagctagaggcaatttcaattgtgcattttgttattgtctattgttctgaagactgcataatttattggtttaatttatcctaatttatttgatgaaggtgtacaattttgtattaccaaggatgtactgtaatattaattgataggataaaaacagtgagactccctgtccatattcaaaagaaaacaaaaaggtgccatagacaattgattttaaagtaaaaagtaaaacaatttagtttggcagctactaaattttaaaacaaggaaaaactaaaggacaatgttgtcatggggagggcggggagggtttccgttgtgtgttttaagcttttctatattctccgaactttgaccgtttgctttgtaccactaaagggtgcagtagtcaactgccttgtgtgccttccatcctctcctaaactgaatgtatgtgcagtatatatgcaagcttgtgcaaaataaaatatacattacaagctcatgtcatttgggttttttgttttggttttttttttttttttttttttttcctgaaaatgcctgacattgtggttttggacctacgaggcttcgttccagctggtctgactaatatcaggttttagctttctgcccattgctgctcttactcatgtaacccagcatccctccagaaaaggcctggaagtctccattctgtgtcaggaggtttgctgtagtggcttgctttctttgtagaacctctcacgcagatttaacttcagtgcccttcgacttgaaggaagagaaaaaggtagttaaaatgcttgctgtatgagtgtcaggatctgagtgtggatgcctagaatgcacacaaagccacgtgtaggagcaggagtgtgcaatcccagcactcttagagtgagatatagaccctcagaagcgtgtaagccagctatcctgaagatgaagaccagctagtattacagtacacatactagctagtcttggggtacatagaccagatagcctgaagatgaagaccagctagccttggggtatacataccagctagtcttgaggtacatggacaagatagcctagggcacatagaccagctagtcttggagtacacagaggcaaataagacccaatctcaaagtaaaaaataaggacctacacccaaagttgtcctctgacctacacccaaggttgccctttgacctctatgtgtgtgtgcatactcacatacacgaacacgtgaacacaaagatttctgaaagttgtagtgcctttaagttggcaattgctactgttaaacctgagaatcaacaggacaaagaccaattccacaattatttgattaaagggagctctattcagtactggtcgggaagatgaacactcgccaggtccacacctgggattcgcggagaaatggccccaatttcaggtcagtcgagcgcttataaaaaccaccccctctagaggctatggcacttcctgccttcgtccaaccaggggtaatcatgcatgctgacgtatgtcctgcctgtgttttcttctgtcgacatgtgatcaagcacattctgtgcagttggggcaaccaactctgtttattgaagtgaaaacatgtgactttttgtctcacaagacccacagcgcccccagcaatccaggaagttatgtgcccttgggcaagtggggattacaggtcaacttcagccctgacactattgtcaattagaaagagaaaaaatggtcttcaggttctcatagcaacaagttattcaagcatggggctcatatgtttatgttgttcccactgttggactcaggagtaagaaaaacttcaacactttcctaaaaggtttcttcagacattattggcaacgtgtttcctactgcctcttgtgtgtgtgtgtgtgtgtgtgtgtgtgtgtgtgtgtgtagggctttaggaaatagcatttgttccctttgctttgtttttcttaaaaaatagtattatacacttgttggcttggatactacttggggatgcttcagcaagtttcaagcactgggaggctggtctccagtatggcagtaagaagaggcgacgacactctaagagatgacatgcaatataaggcagctagctcatggggtgggggtgggaaccttcatcaaaggaagggtctaagcagttctttcagggccctggtaagttcccctaaaacaatttggctccaaaggggcacacttgggcactgactctgtcctcctgccccaccttataaggaagggttattcctctccactgtgttcctgccatttacaacaaaggctttgctggggtgaaccagtgtggatggaactacccaatttggtccaaaaagtgtgaattaaataaaccactttatatcttaacgaaatgtctggccctctggtattttgctataagaactaaaagtggactgtatatatatacattttttttttaatcaagaataagcagaactagcctgaggcagactagcgtcttctgcccaccgcacttgtcctgccatgtctctgctcactactgcaaactgtctccaccaccccctccctctgggctcttttactttcactccaatgaggagaacttcatgcattggtgcaattgtacaaggttgcctggagtcagtgtgatattgaaactgtatcaaatagtaatagtgaaactattaaagaatttttggttctttcttgacagcacaaacttaaattacagatttcctagttttcctagctaaagtgtgcaaaggggcaagcctttgtctcactatgccaacatagttattcccagagtagagcaaatggaatcccctcttttctcacccactcttataaaggagaaagctcaaagccatataacaagtttccatttccatgcctagagctgtccagataatccacagttgaccaaacaagtaagagcaggcagagatgttttctcgtaagagttaattaaagcagtgcttctggggctagagatggctcagcagttgagatcattcactgctcttgcagaggaccttcattcagttccaagcacccaggttgtatggctcacaaccacctgtaattccaactccaattcctgattcttccccctcctggctactgcaggtactgcaatcacagggtgcacatactcaaaagcacctacacataattaaaaacaataaaaataaatctaaaaacctggtttcaaagttttcctttggtgactaagttatctgctggcattattctagaatcaatcagaccactgttcccaaagctgatataaacactccagacccaaacttcactgcatacatttttttttttttttttttttttttttggtttttcgagacagagtttctctgtgtagctttggaggctgtcctggcactccctctggagaccaggctggccttgaactcacagagatctgcctcctttgccttccaagtgctaggattaaaggcatgtgccaccaactcctggctactgcacacatttcttgagggacatcaggatccaattcctactggaacacacaggcttcacaggcttcacaggcttcacaggcttcacaggcttcacaggcttcacaggctagtaaaaatgccactttattaattttatgtgttaaagcaataaacaacttacaatgtttccatgcaagtgtgtccaacccacacatggtcatggatgtctacatctgatgcccaaggcaaaccctaaactcacttaaaacattaaaacagtatgaggtgtgtgtgtgtgtgtgtgtgtgtgtgattattctttctgtaacttgttctcaagcttgaactaactccacagatgataatgatgcctgatgatgacaagaggttggacaagccttcaagctagcaactaatattctacatatatttgtggggaatttaccaacacgcatctgagcagcaaacagataccctgaatcagagtcgccggaccatatctaatcacacatgcctgtgcttgtgtgtgcaaactgactttacatagatgcattaagatatttcagtgaaagcagggggaagactgaggaggaagttgaccagtaggaaaacagaaagggggaagaccaagggtaaagaagggaatgagatgcagcaaggttcatctcatactagaaacaagtttccttcatgaagccctgtgtatgatgaatataggccagtgtattttttaaaagtgctttcaaatctttgataatacaaagaaaatatttgccataggttagggtctacggatattttgtttctttgagaaagatcttcactagggaagtagcccaggttgactttgaactcacaaccctcatggctcaagccttcccagtgtctgggattccagtgttctgtgagcaaccacactcagagtcataaaatgtaagggaagcataaataaaagaaaacagtagtcctagggggaaagctgataactatgagaattatgaaagatacaaaagaaataaatattactctgtcatcaccaggagggaagaatgccctggggtgaaaatccagtggttacttttaaaatgaaaattccattcaatttgagggaagccctgactacatttactcaactccaacccttcagtggcccaggacagctaggagaatcttcaaagctagtcagggcggttagagtcctatgcagtccctatgcacccaaagcacttctgggtgcagaaaaaaatactgcttttttgtttatattggttttgtttctcatgagaaatttaggttaaagagcaagcaaggcaagagcaaaattctaaaggtggccaactgtgaccggacctgtctctatgtgtgactatcttacccttcagtaagcatcttggcccactgccaagcactgggtgctagtgtttcctgtccccgccccttcacagggatgggctgtttagtaaagcaagagttgagatatcaaggactctgttttcttttaccatcggtctgttgctggagtcacgtgagatgcacacaaataaaggcttgctgccttcacagtaaatctgaagtctcctgacagagtggtgaggaactagacaggctttccctacacacttatggcctggtttctgggtggtagaactgtggggcagctccttgtgccttgcagagcctctgcctccaactttccttcctaacccaccctccccgaaccaatttcctgtctccagtcatggactcctaactcatgtataagacctctctggaggagacccccttctttaccagtcaggaacaataattgtcatcagtgaagtgtgtatgtgtgtggtgtgtgtgtgtgtgtgtgtggtgtgtatatgtggtgtgtgtgtgtgtgtggtgtgtgtgtgtgtgtgtgtggtgtgtgtggtgtgtgtgtgtgtgtgtgtggtgtgtgtgtgtgtgtgtgtgtgtgtgtgtgtgtgtgtgtgtgtgtgtgtgtgtgtgtgtgtgtgtggtgtgtgtgtgtgtggtgtgtggtgtgtgtgtgtgtgtgtgtgtgtgtgtgtgtggtgtgtgtggtgtatgtgtgtgtatgtgtgtggtgtgtgtgtgtggtgtgtgtgtgtgtgtgtgtggtgtgtgtgtgtgtgtgtgtggtgtgtgtgtagtgtgtgtgtagtgtatgtatgtggtgtatgtgtgtggtgtatgtgtgtgtggtgtgtggtatgtatggtgtgtgtgtgtggtatgtgtgtagtgtatgtatgtggtgtgtgtgtggtaggtgtgtggtgtgtgtgtgtgtgtgtgtgtgtggtaggtgtgtgtgtgtggtgggtgtggcactcggtagattcacacacgtgtgtgcagaggtcagaggaggagggcatcaggtgtgctctctctcgccctttattcccttgagtcagggtctctcactgaacctggagcaagaatggggccagcaagcccccagggttggtatgtaatgctgtgtgtgtccccaaagcaggcttctaccagggtactggagtgggaactcatgtcatcatgcctgtgcagcaaactctcttgctcacccagccatctctccagccccatcattagtgacgaccaaagccggaggggaatgttccagaactctagggcaatgtgcattccttgtaggactcccaggtcaaaactgtttaacagaaacattttcactaccatactgaagaacttctctgtataaaataatgacctcccggatagaataaatgatggtaaagatgtgtgtgtggctgagggctgacaagatggctcagagggtaaaggtgcttgccaccaagcatgaggacctaagttctattcctaagacccacttggcaggaggagagaacccaccgccacaggcagcccactgatctgtacatatacatcacacacacacacacacacacacacacacacacacacacacaaccacacacacacacacacacacacacacacacacacacacatacatacaccacacatacacaaccacacacatacacgcacacgcacacacacacacacacacacacacacacacaccaatacatacaccacacacacacacacacacacacacacacacacacacgcacacatgacaaatagtaaacgtaacacatttatgtgtgcttgtgaaattaagtaggctgtgtagaactgagttttaaagcagggtttgtctacaaggcaatgacagcccagcactcactgggctgcataacagatctttcatgatgagtgtgaaaatacacaatagcatgtggattctatcagaccttccaaagacagattatgtcagagaaacagcgcgagcctggcacagaaatcgtgcaaaccgcagttagttagcgctccttctctcacagtcagtagcttttgtcatcttgccaatgcatgttaagttgtgactaagaatgataccctaacccaccccaacttccaggacactcagacttggaggaacacagaggacacagggacgcacagcctttgtccccctagagctatttcctgaattcagaactgtagctgcctggccacccccacagcctgggtcagccctggagtggggcagcttagagaactcaaggcaccatcacacactgaaacagaatgtgtgggtgccctacgctggcaaaggggagggtgttgtttgcaaagccccctgcggggcggcccaggtgcagcaagtgagagggttcaggagacctttggcagctaccctggaaaaaatgcctgcctctctgcaaataaatcctgtgagtgtacaaagactgggtttgcctggtgtttgtgcaaacaacacccagtgctttactggtgttggaaacagcttggtgagaggagcccgaggtcccggcaactacagtgacagatgtcttgtccttgttgtgacttttgaccttttgggaactgattccccaaaaccaatgttcttatttccagttactcacaactggaaagtctttggcaaccattgaaaagaaaatgtcccctccatctcccttcatggctcagcagtaacatggtaattggaccaaagccacaaagcctggtgtcctgtgtatgagaagaggtatccaaaccttcccagaaaactcacaataaatgcactggctatcagttgggtgttattttccctcctctcagtattcagcaatctatggcgtgtacagcatagctgcctatatgaagtatcctggtgaggtaggagcaatggggagagaaattataatcacccaaaagtaagaaatgttagctctgtgttacagttcttggctagtaaagaggccctaggtttgatccctgggaacacacacacacatactcacgaatttaagacactttgacagaaccaagggccatagaataaatgatcaaagttatccaagacacaaaacagaaaagcaacagtatctactcctattctccaaaagcagttggtctctatagatttgtggttgaatgtagccaagtattcaaaaataattcacattacatcttgcccgtatgtcacatgcacagacggtcagttcccttatcaagttcatgttcatgaacataaatgggagaaacaagcagagccactccagcaagtgtaaaacagagagcgtgccacagacaagcagagttgaaggaaggtctgggcttattcccgggtaagaagacaggaggaagtgaagtggagatcagtgtgtcttgtggggacagcaggctcgctcaagtgccacctgctgtccccttttcgtctcacaaagcagactctgcccttttgacgcgtcactttgctgcgttgcctaactctgaggctacctctcacttttgtcttcttggaacctgaaggctttggacaaagccaggttcaactggaacaaattgcagcctttccttcaattattaaacagaggagaagaagaaagatatctggggctgggggtcggttcagccggcagagcgcttgcttcggtccgggctcagaaccacaaagaggtggtgtggtatcgtatatatgtcacacccacgcttgggacatagaggtggacagatcaagagtacaaaaccagctggggctatttcagatttggtatcaaaccaaacagaagtctagaatacatagtgtgtcaattaaagaccaatagtgtgtctgataccaaagcaacccctgcattttcattttctgaaatgttgacttctagttacagactacttctttaagtcctgtgagggaaaaataagatgagaaatctgttccaaatggcactgtctccaggagatacagcgtgcttaccagagtccccaccatacagaatagcaaaaggaacacatgaagtattcatcttattttattttatctctgaactagtgtctcctgtaccgcaggctggcttgaacttgctaaacagctggagttgaccacaaactcctgatcaccttccctttaccttctgaacgctaggatggcagatgtgtctgtctgtcttgctattaacttgcacgtagaagccagaggacaaccacagatgtcaccctcagaagcaccacccacttcctttgacagtgtttctcattggcccagagctcatctgttaagctggtagacagctgaccagtgagcaccacgcaccctctggcctctgctttcctaaagcattatcagcactgccgccatccaacatatctgccagggttctggggaccaaactcagaccctctttaccaactgtttctcgctgacctgagactctcaggccctacttgggttcttgccctctccctgtgatgaagaatgtcacactccctggtcatgagaactcagaacccttccctccagccactccgtagccgaggcctctgctacttgttttgtgtagccatcaggggactttataatttctgtaacgtttagagcttcaccagcaagcaaacataccacttccttacagggcacatatgaagaggtaaaacactgaggcccagggggacgtgagccatttgctgtctgagaggaaccgagctcctgcctgggatggagccacctgccagcttgtgcagtgtatcgtctgcacagagaggctcacatcagtggtcacagtgccattcccagaaggagggaggcgccctcatggtcccggtgctatgggctgcaagctcaggctgcatcagaagaccaatgttgcttctaagtcagggtttgctcctcataaaatgccacgtattccttgacctgaggactgagtgtactgttgagtgggatgtgtcaggggtaggctgtgctcaacaaatggttgagagagaggaagtcagagagagagagtgactgctcccagtgagcaatggcatggtcccaaagcatggtcatgtgcttcagagccacctcagtttaacagacccaaggagccactgtggagctcctggtcaggacataggcagtgacccagaataaatgatctgagtatgtgccttgtcctcccccatgtcagaaatggaagggactgtcacatatgcacacatacacatgcatgtacatacatgcacacacattcatatacatatacacacagagatgcacacacatttatatacacacagacacattaacacacatgcatacacatacatacatagacacatacatatacattcttacatataaacacatacacatgtgtacacacaaatatgcatatgtatacacatgtgaacacagatacacatactaatatgcatgcatacacatgcacacatatatacacccagacacacacatacatgtgcatacacacatacacatatttatccacacatgtacacacacacactgctgcttttaggcttttgttttagcccatagaataatgggtttcaaccacagataagggagacgtgttacactgtgaggaaagtttactttgaacagaccagagttcaagggtaagtgatcagaaaagagacaaacttacaaaatagatggcacaaggtctgggggcgtagctcatggttgaacacttacttagcacgtacaagacactgggttccatgcccagaacagaactatacatacatatgtacattatatatactcacatatgtgtatttgtgtatgcttatgatgacacaagcatgttcctgtgcatttgggtggatggccaagcaggaggatggtgatggtgaggaagaattgtgtgtgagaccaagtgcttgcccatctgagactccatgccccagagaaagtgtgcacaggaacatgacgggaagacaggaaatctgatcacccatgccccccttccctgacctctcaccccaagcctcaggaaaggaaaatcaatgtgccccaaagagcaggagcccaggtctggggctggaatttgacccccgcagagtgtttgctgatccagagatgggattcgttcaatgagttcatcctttatcttgagaggcgcctggggagcttggactaaggcaaagccatgttttactcaatgaaaattcacagtcacttttgggtttgctatgcacctagtctcagagagaacatcaccttgcaggactccaaagactgttcctgaaatgtcagcagatgagacactaagagaaaaccaaacttcatccccaaatgtcttccatttccctctctgtggctctgcagtctctacccctcctcaccttctgcaaatattgactgagttcaagggcagtagtctaaggtctaacttcagagtcagcatgagctgacatacttaagatggtgcaatccctgctaatgaagaacacagtgaaccccaaggtcagtcacaggcaattcctgtcccctgacccagttgatatttgttttatcaagtcaggggctattcttgtcatcattgttaatcttcctctcaccagatctgcgttggccgagggcatgcacttgaggtatgttagaagaatggagggctgtgttgtgggaaagaatttttgctaattctgtctgcctacagcttccttggccctgttcatctgatctcaacttgctcagtaaaattggaaaagtcaggaaagtgtggcaaactggttccaggaagtagatttggggccaagagcacaagacaataatactgtctgttgaccgagagtcctctttcccttggagacaacttgatttattgatgggtaaggtcttgatgcaatagttttgtctgccagaagttcatggccatgtggctcctttagctcatgaaggctcatttttggcttccatgtgacacagctcctatctgagggattcttgggagacctaaggtctgtgacagcttgagctgggaataagaatgaagtggtactattgacccatgcatggacttggtagcaaacggccctggatcaaactcccacctccccgagcctcagcatctttgtgtgtggaaataatcgtagcaatgttctccttgcaagactgttagggggattaaacatggcattgtatctaaaagcattcggcacattgcctgctgcttcaaatgggattaataccttttaacctccttccttccgctcagccactccagctgctggcgtctcccctttctctgctgcatacatttgacacagtggaaccaagccagtcacgctggaggggatgcagtcctcataagaatgaatcaaggaaagacgaggctcagttttctcagaacagcagtgctgaacccaagccgtgtaagccccacactcgctggaaagaatgtaaatctacaaactgacttgaggttgtgtagtgctttccacagagaaagacaagaagaaagaagaaagataagtccatgtagagaacttgtttggccatgtagagacaggagaaagataagtccatgtagagaccttgttcggtgagggtttttaaaagtctgataatcatagcaaccatcatatacttcttttgaatgtagatttataaccaagttatccatcagactaagggctctatataggttgatcaaaggagaggaggtatcctttagactcacagccacagttggctgttccactaagagtcacgcccctgacaggccttggtgaactacacaggatcccaggcacatcctcccttgagcatcatggcaaggctggaacccactaagctccatcctgtccttgaacatgctcagctttcaaagctgcctccaaacatcttgctccccgacctcaggtaaaatgtttgtgtgcagtgttgtattggttaacttttctgtaactgtaacaaaatatcacccaccaaagcaactgatgaaagaaagggtttgtgaggggcagcgatggcgcacacctttaatcccaacacttgggaggtagagcaggcagatctctgtgagttcaaggtcagcctagtctatacagccagggctgttacatagagaaaacctatctcaaaaaaaaggaaggaaggaaggaaggaaggaaggaaggaaggaaggaaggaaggaaggaaggaaggaaaataacaccattaggaggggtgatagatccagattatcatggggaaattagattgcctctccacaatgaagggaagaaggattacatctggagtgcaggagatcctttagggcatctcttggtgctactgtgccctgtgattaaagctaatgggaagccacaacagcctaatcccgacaagatgacaagggcacagacccatcaggaatgaaggtgtgggtcattcctccaggaaaagcaccagggcctgctgaggtgcttgcagaggatggaggagataaggtagcaataaataccagtaaagaccttcctctcccctgcaagtccagatggaggacacacagctacttctccagcaccatgactgcctgaatgccaccatgttgcaacgtgatgacgatggactacacctctgaaattgcaagccacccccaattaaatgtttttcctttataagacttcctgtggtcatggtctcttcacagcaatagaaaccctaagacagtgtccccatacccaactcagggattctctatgtgtcccaactgggaaagacaagaatacacaatgcaacattgagaatatatctacatttgattttgaaaaaacggacacatcaaccaaccttctaaataaatgacttattcatgttttctgaatctggtttctattcatccatcctcggttcttccagtattaccagagggcgaacacaggaagaaatgagaaaagaccctgtaagacagttaataaatattcaaagatttagtatatctagttgctagcaatgaacaactagactatatgatagtgataaaataggaatcagacatataaatattaggaccgaagacctaaaaccctgctgtaaagacacaggcagcatttacaaacacaggcatgattaacaacaacagtaaccaccatggactatgttctttcagtgagccaagagtcctctactaagactttaacagaaacaatttctttggttgcctcagaactgtcacaggtggttaaaattatactctcattttcttttttataaaggaaactagggcacatcaaggcaaggtaacttcttgaatgggaaaaccaaaaacgataagtagatttattttccctaatttattcaattgaattaccttgaaaattaatgcaataaatttgctgtataaattaatgcagcttcaatcaaatttcatagactggttcgtggaactctacaaaccactttaaagtctaccaagaagaggaaaatgttttcatggaaatctacagcaaagctggggtggggggcatcccagttaatgagctattagaattaaaccactacaatttattgaaatgatttccattaaagttcagtacagttgtcagatgcttcaaaccttatgacaggctgggacgcagagaacactggataaatgcacattttgatctctcttccctacggttttcttgtaaagataaacaaacaaaatatgaagctaccgtcattaacaatataaagaccaagaaagaatattttagaagcagatctgataaacccagaaaaggtacagatgaactcaggaacttaaccaatgttgaagagtgcttccaggtgaagggaagaagaggagccactcatctaggaactgaagtgtgtctgctgagatctctaggcttagtggctcacgcctgggctctcggtgctttgtagcctcaaacagaaggactgagtctgtggtaaccccaggctacacaatagaatcataaaaaaaaaacagaaacagcaataagaaaaatcagttaaaaatacaaagttagatccccactgcatggcatgtaaaaatgagttcttgataaaaggctgaaaatgtatatgtgctcaacctctttagaaaagtcctcatagagatgccagcaagtgtgtctctcaggtgtttccaaatccagtcaagttgaggatgaagatgaggcattgcagttacataaagttgcgtcttagcaacaatagcacggggagtgtggggcaatctgagaggggaagcaggaaaaagcatacttcgtatgaatacagaccattagttatgcacaaagccatctgtaaatcaaagtaggaccgaccacatggtagttaaatgacaaagggtatgagtggtcaaaacagtgaccgaagcacactggagagtgtgctgaccgtcactggcagtcagagaagcactaactacaacacaatgccattttttagacaatgagattagagaagtagacaacatagttatccagatttgacaagggcatgggaacatggctactgtagctaggttgtagatagttctctcttttttctaaggggggaaagttggtagtgtcagacttttatatggtattgtaattctatgtctgctacatggaaacattcagaagatacacaaaatatccaaggagcatcattcaagtattgttttcaaatgcagaaataaggtcatgagcagatgaatgaccaaatatattaggttacttccttgtttaggatgtcagtggatggtatttgtggtgaactgggccctcataaaaccactgaagaaagatagacaaagcaaattattaaccaaaaaaaatttggaagcagaataatgtagcaacacattttgccaattccctgaattcattcttccctgcatcgacagttctaacactcatgacatgagcagtgttttgtgtgtctgagcagaagtttctttttagcagaacctggaataatgctatggtatgccctgcaatcgatgcagctgagccatgagacctactcactcacataccaacagactataagtcactgggcacttacctgaagccttcctgtgtgctggtgtaggtgatggcaggagagagagaggctgaagagaagaactctgtcctttccctttgtagcacccctggtctgtccattctgggatttggctcactcaccccatttccaggactacccatcagatccatgcaggtcaccagcactgtccctgaaaagaacagaaggaagacttctctggcacctacagaggagcagtgaatggtagaccaagtccacgtcccaactaagacagaatagaggtggcaagatgaagggacttgtcatcgggcacgtgggacgacgtgtccagtattgcagctgaggcaccaagctctggggtgaaaggtgtgcttcagcagagccaccgaccttagcatcctcaaacatcattaacaagagtcaccatgaacagaaacccagttgactgaagacccaaagcttatcctgtcttcctaaatcccataatccccagggttcccaatcagtcttgaggagaagagagtcccttctgtcaccatccataacaggtactacctatctggttgcatagcaaccagaacacataggaacatctgtacaagagacaggcagatctgcaagcaggtggtagagggtagtagattagtggcggatcagcagagtcatggcaatacaggcatttgctttcttagcatatgcggacttagctcatctcaggtgctcagtgttcaacagagtccaggagtacaggagaaactgcagccagcctacccaagccgtaggtggccacaccagcctacacgagcatgctcagcaggcactccctccctgagccaagcctacttctatgtccagagactgctgaccgagagatacctgaccagcaacaccaatgagaaaagggaaactcagcagcggagtcagcgcctgaaccaataggaccttgggagggggcataaaggcaggcctaacttcctactcactgactcgtggtgcctgagttgttggttctgtgtcttctcaccccctcccccaaggggtgtccagtagggtaaccctcaactcaggaagaatcaggacctgagtccagtcctcatgcaaatgctcctcaggagtgcaaatgctcctcagggggctttgtccatggtgtgtgttcatctatctcccgagtgaaactgtaatctccctgtgcactgctaccctggagtgaccaggcaggtagggcttttctcacccgaagtgagaaatggtgcatctcagaggcctgggaggcacccgtttcacatgaactgtgtacaggggcctcagcagcaggatgctgaagacatttctgtctgggaatcagtaatgcaacttctcaaacagtgactgaaaactgtctgaggagaggaaggaggatgcattccactcttgccatctcttccttccatcagcatttgctctaacctgggaaacagcagtgagggcaacagccgtagtccttaccctcacgaaggctcaactcttgtggaaaacggctatttgtaaataaaattaataaattgcatagtccaaagcatctgtcaccagaaacagagctgagactcaggaaggaaagaagagcaggcaggacgacaagcatctctgggagaaagagcagctctgagttctaaagaacagatactatgtatcctgaggccagacaggggagaaacagatctggactgatgtgcaaggccctgggtctggtgaaagtactgaggtttgggggacggaaggcaaattccacagacgcagagcccaagctgtggggtgatttcctggagaggctggggtgatgcggagggtaaacagccttcagcagcctcccacatggttaacaggctgtttgtttcctttgacagataaaagtgagttacattcaaggaagaaaggagagagagagctacaaaccccacatctgcaaagcccttcatcctaggtgacagcatcttttccccaaaatgacttgtgtcatcatccaaacatagagctcgctggctcgagctgagagcccatggcctctctgtcttttttggctctgaccccatgactcatcagtactctctggttttcaattgaccctccttcatcacgcctatgcccccttttctccacatcgttggtcagctacggctattgtgaccgtccactctcctcacacacctacagtggcagcaaacacattgcacctgcttttcccacctacctcttctcggcccaccttacaatggctccacagttttgaacagcatacagagcaattgttctgaggcattaatacaaaacaccaatccatttgcccacaatctggtcttttatcattgctccaggctaaagtctccagggtttaggagggttctagagaacctcaaggggctttatccatggtgtgtgctcatctatcttcagatctgttgctggctgatctactcctctctaggggctgttacttttggctcgtgaaacaccctctgtgtgctgctagaagtaattgacctttctggagcacatctctgaacatggtattgcccagattaaggctgttctgaggctccctgtcactgcagtatcacagctaagtctctcagataagggactgcacctcactttccctgcagcctcctcatttctgtgcttctgccctctgctctcagccttgcttttatccaccttgtttccagcactgagttgtgtgtgattcatcttgtgttttgaagcctgggggcatttgcatacatgacccctgctcttgggtgtctttctttccctatttgttgctatgcctcttggtgactctttagaggacctagaacacaccaacccaagccatcagtccaacctaagagcaaagtctgcaaagggtgacagtgacttacattcttcatggtcactctgaaagaatgaccgtgggtggatgagtccaacagaacaaagatgaaaaccaaaaaccgcacagtaaagaataaagaagtagaaactggaagttgtaaggaagataggtcggaagttatgtagctggcttagaacggaatcgggtcaagttaggataaggacgtgagggttccaataaggcagcttcagaggggaaaacaaaagactcacacatgggctctgcagagtgactaagaagctgaaagagattgttgaaagggtaatacaattatgtcatctttcccactacaaaaaaagatcaaattgaaactccaagagaataagaaaataaacaaaacaaagtaaaccaagcaaagatactaagggtgaaaatgacagctattaaactgtaacaaggcctcataaaactgatgaattataagagagcgcatgtgtatttcagaaaaacagttgccatgcaaacacttgaccaaaagaaagctggggttgtgagcctcatgtttgggaatgagactggtgattgaagtgattagagcaggatcctcaatctgtggtcacagccctttgtggggtggaacgacccagatcagatatgtatgttatgattcataatagtagaaagttacagttatgaaatagcagtgaaaataattttatggttggcagtcacaacaacatgaggatttaaaaggtctcagcattaggaaggttgagagccactgctttaaagaattgtgttatctaggtcgggtagtgtgcacttacaagccaagcactcaggaggctgaggcagaagggttgtgagtttgagggcactcacccacctagagctctgagccatcctgagctacaaaatgagagtctgtgtcaaaaagaggaaagaagttctttcaatgttaacaatgaagtcattatcctgaaagtggtacaggggccatgcaataaaatgcacatgataagggaagacagcttattttgtacagtgctgtctgaaacagtgccttaggcatggcaggggatcacgtgctatttaatgaatggtttcgacgcagtagagaagggagcacacctcctaccctcctacctactggtttaggagcacccagaagccagaatcataacaatgtcagttgcttcccgttacctcaccactgagaatcaacgtgcgggcctaacagagctgacacaaagatggttccagggaagtgaataaaagccatcaacattagcaatgagaacgtcaggagacgctgacgctgctaccctcacctgagcaatcaagtcacgggccggagacggaacaaaggcagagattcgatgggggcatctggcgatatcggcagtggcaaaggagaccagtgggaagagtccaggcatccagggctgccagcagatccctgccctgcacacaagcccctggcgagcttatcccagactacagcttgaaatcctatctgtatgccaacagctccgcagatgcagctccagctggatgaacccagactcttccatccagctgtctagtcaaggcttccatgtggacgccgacagcacatttcacgtctaaccatccccagcctgaacttctagtgtttctgcatccaagcccacagagtgcttttctctcactcagtaaactcaactctagccttttagctctggttgcccaaacctttctttggacaaggcctttgccttttctttttctctcacattctaaggataactggtttgctagtcttctagcattcaaaagtacattgagaaaccagaactctctgcattgccacaaaccctcagccatgttttcttcccacccaagcttcctgtatctgtcttgttcttgttctctgtgtatgctcaacacagcggctggattgatcgatcctgctatggacgggaatgcagttcttcctaaaactcacatgttgaagaattggcagctgatggtagtgttggaaagtggggtcttggaggagctgtctagtgtcaggaagtaaggccttggaggtatacccctcaacaggatattggtgtaacaaccccttcctgtctctttttttcctttctgttgtcataacatgagcagctcactccactgtgcttgccttcccaggatcctcttcctagctacagacccaaagcagcaggaccatgtgtccacagactgaaacctctgaatggtgggtaaaaatggaccttttcctccttataaatgacttacctcaaatgctttgttatatcagcagcaagttaactaacacagattcaggtaaaatgtaaaatgcaaaatggggctggcaagatggctcagcaggttaaggcactcgctgccaagcttgccagcctgagttcaacccctgggacccacacagtagaagaaaagaagtgatttctataaattgtcatacggcctccacatgaacactgtggcatgagatgaacctacacacgcacccaagtaaataaagaaatagataataaacatttttaaaaacataaaaccgtgtgagtccctgaaatgaagcttagtcaccagactgggcgttgagcatctgtgccctcagagccatccatctcactggccctgttttctttcttggctcagtatcagccatgtcattggtctatttgttcatgagttatctaccttcgggaagatggaaggtgatccttttgatggttggtgcatcccctggaactcagaaggtctcctcatctaatgatgatgctcagtaaacacttctgaatcacacaccgagcacaacagtgaacttgtcaaagatatgggctcactcttccatttactagagtctgatgggggatgtccttctatatgctgcaaatatgtgttgcttttattggtagatgaataaagctgtttcagtccatggcaaagcaaagtaataaagccaggtgggaaatccaaacagagaaacagacagatagacagagaaggcagagttgggacttgccatgtagctgctggggaggaaaagatgtcaggacatcactggtaagccacagccacgcggcgatacacgaattagtagaaatgtgttaatttataaaagtgagagctagctagtaataagcctaagccattggccaaataattataaatagatacaaagtctctgagtgattatcttataggtggctatgggggcctgatgggccaagagaaaccagtcaactgggttcaggctagacagagaaaagtccccatctacaagagtcctcattgggtaacatacctcagtcaatgactataaagtgggaatcacaatgctgcccccttgctgaatagcttatgtcaacttgacagaagctagggtcacctaggaagaaggaacaccagtcgagaaaaatgccctcataagattggctgacagtcaaggctggaaggtgttttcatgattaatgattgatctgatatgggaggaacaggttcacttcgggcagtgccctgggcaggtagttctagcttacacttctgtgattgacaggtccgaaccatagactctctgacagcagagattatgtgtcattcacaatagctggcaccacacgtgagtcctgattatatcttctatccattgtttcaaatcaatgaaaacagaacacaaagggctggaaagatggctcagtttgtagagcactttctgtacaaagatgagggtctgagtttggtaccccagtgctggggagaagaggcaggaggattcttcacactcactgcccagcagtctagccaaattggtcagctctgggttcagtgagagaccctatctcaaaggtcaaagtagagagtggttaatgggaaaagccaacatccatctctgtctccacatatacaggcacagacgtgcactcacatgcacgaacacccattcggagaagcacagtgtggaacccaattatatctttgagtccacagccaagcctgagcctggcggctcatttttgaaaattctcttgaaacaattaagagcccttcacacccgcatatagcctctggatgagagtaaagccttaaagtcagcagcatccaaagtgtccccatccctgcttcctccatcggcagaggctcctaaaactcacctactccccttcctgtctcaatgagcctgagtttctgtgcacccgctcatcttcctgccctcctcagcctctcacaggcggaagggcaatcagtggcctggtattatcaacccaccacatcttcacagacttgtcggataaagactgttgttggagccattcacaaggacatgaggaaggaaggagtaacctgcctgaggtcacacaattagcaagtgatgaaatgaccgcagcccaggctggctccagaactcatgaggaagctagttttatcagtaggacccatggatgagtgcacagctgaatgtattattagcaggtgggtactgtctagaggaagtgtaccctgccaacacccattctgtcttctcttgctgcttcctggccaccttgggtgagcagtttccttccgccaggcccttctgcctaatactgctgctttgccccgggcctgaacacactggagtcaaaacgtctggaactgtggaccaaaataactctctttctttcttgaactttcttgagacttctgtcacatggaagaagactagtgaaccctggggctatagccagtagcaaccaaggatttggatatgccttgggctagagttacccaaccttttcgggaaggagaataaagaaggggaaattcaagcacagagaagactggtggtgtgtcggcagcagggaaagcctcatggaagctacagagggtcagagaaggagacactgcccttgtgtgcagctgctgtggactcagggagatgccagctctgggttcgaatccaccctctcgtctcttattcggaggcccagaacatagcgcatacagctcaggtgtagtgacatgtaagtgatgcctttgtgtctggcttcgagagaaatgtttcagcagagcctttgttctgtctgggttcatcagtgggggctgagaaattgttttgagactgtttaaaccttgaggaaatgtttctctgaagagtctgcgctggatgcgatgtgagagcttaaagctgcaccgaccgaccttgctgtgaagacactcctggcagacctggagctcttagcaagccataatcaaaagggcctgaaatgtgtgtgggtcgtctgctctcatgggcagcaagagcaagatgactttggtagctggaacctttcccagccccgattaaccttgtatatgtttgaaaaaaggtaactggagggagctagtggggtgtcagtcttttccaggaaggctgaacccctctgctccttcggaaaatgaaggcttagtatcttggtgagctgttctctctactgtggcacctacaacatcaaaccatactctctctgttcgttacaactaaaataggtttcaaaatatctccatcaacaagattatccagagaggtacgctgccggttaaaatgcagaaactaggtggttgtggtacctgatctcagcagatacatctgcaacataaccctatacctaaggttcagggaaaatcactggagaaagggtggaaaaatgagatgccttctgatagctgtgttccctagacatggcagggacatgcatccatagactgtcaacagtatggttgcctgaacaagaccaacgtatcaccagctgacatgccaatgcagacagggggtttccacactgtctctgccacctagataaagaactacaggtggccaatggctgctcagagatggagatcagtctcctccacggcgggggggggggggggttcccacgtgatcagccctaggcactgtgcaagtgagcaacactacacagactgagtaggctatatatatgtgtgtgtatacgtatgtatgtgtacatataaagacttaacaatgataattaaggaggagatcatgagattggtggggggacgtgggaggagttggaaaggggagggaagggtaataggatgtagatacagtgttcttgcgtgaatttcttttaaaaatgaactatttttaaaggaaacacaaacgcttcatcactaggttgctacagcaatatatcttagtataaaaccaggtgcttgacaaattcacagtaagtggtagttattactatatgagagtaaaataatatagattgattttatatgtgtatgtaacaatttgtcagacgtgcaatggtttgaggagtgcatctcttgggcctagactgaaggctcagcattaagaacagtggctgctcttccagaggactgaggttcaattcccagtacctgcatggcagctcacaattccagttccaggagagctgacttcatcttttggcctgcacaggctctgcatgcccatggaacacagatatacatgcaagcaaaacatcctaaagatttaaaaacaaaataaaattaaaagaacaggttgtctctggagacaggaagtggaggaagggaccaaaagcctgagtggtctgcactaaaagtctgtcagagaaaagaccaggtgcagatgacagagcccgggtcacagccaaagccgtgcccaccttgcctctcttcacaggaacctgtgtcttgctgtttagtacaggtctctaatccaatggccccaaatccacagcagacagacaggggtctgccaaccactaagagacagctagttgccatgcttatgggttaacatagcctcttccagagctgttttccctgcccaaggggacatctgggtggcctgtgtgtctccttgggtcttggatacttccatttaaatggtctccccctagtatcagaggaaaacacatcagcctggtccttctctgtctccacactgcagtgctgagtgcatgctacctaagtcctgaccaagaaaacacttgccccccaccagccatgtgcatcgcctgaccaagagttctacgttacccaagtgtcatctaacagtctaacatccgtcagacctgggtgtacatcaccatctctaaggcacagccatatgcctcattagtgacagggacatgtggttccttgtccaacctgtcgtccactccagcgttttctgtagtgagcttgtggtcaccatcagcttcagccctgccatgggagtctgcttcttaaaccacagtgagtccctgactgcaggagacattcaggtgggagctgatctgtgccctgccccatgcctcacgccccacgccccacgccccacaggaggtcagctgcatgaaactgcagcttgccattaacagtccatcttaactgtgctgctgctgccactgtcttgaaagccttgaaaccctaacttaggggaccaggggtgcagctcagctgcttgtgtagcaggctaaataccctgggttcaatccccagcaccagataaaccaggtcgagtggtacatgcctgccaccctagcacttgagaggttcaaaagctcaagctcagcccagactgtgtagtcaagttcaagaccagcctgtgccacataagactctgtcaagaaagagggggagagatgggaaggatggaagggaggaaaatagaaaatcaaaacaacattaacaattgtgagaggtgttttacattcctgttttggatatggtcaggtcagtgatgtcaccagtgctctctaggagagacaaagaactgtaccctccatctgtgatgtgcagggaggaccacgatctacttttttgttttgttttgttttttgtaaatcagctaagcaaaccccagggatttgtattcatttactagcatgtcagtatcatcctcaacagaaccaggttgatctgttaacctacatgccactgaaccagaatgaaggaggcattttcaggagctggcttgtcaccccagagagaaacctaaaacatcctctagtccccaaatctatctccggattgaactctactctctgcagacttccccttcccagcgttccctgggattttcctccacggcatcttggcatagcagctccttactgctcatctgcgtgtgttaaatattgcttggcacactgctagctcttcaaaacaagagacttggattgtgggaggcagggggtgggcttgtgagttgttcaggaattctgtggtgctggcacggctgttaccactcactagatgcctgcccacagtaccaccatgacataaacatgctgaaaaggagggtgacaacatcccccaagggctttggaaacaaagcttgatgggtgggctgaagcaaagaacactcacttcccttgcagaggacctgagttcagtccttggcacttatgcccggtgactcacaactgcctgtaactctagctctggggatccagcgccctcttctggccctcacaggcacttgcagtcatgtgtacatacacagagccacacacacaggctcacaaataaacaaatctttttttaaacattgaaaaaggaaaagaaacaaatcttggtaacctccctagacttcagcgtggattctgaatgaggctggagtgccagatgaattttccttcttattttcgagtcttgtctccttccatcaacacagccaatatctgggagcaccctgaactttaaatgcctgagcctcccaaatcctgtgtaaaatgagacaactgattggagggcacagcaagggccacttggttcccacccttcagtgaacatgtgtcctgagaccacagcatcccctaggggctctgaagatgaagaaaggcagattcccaacggaaacccaccaaggttaccgggtaattaaccttgacagtgatggggacatgcctagaatagtacttcagatctctcaagacatttgctaatccgggatcttttggggtctgagtgacatgtgtggatatgagcaggctattgtcaccccatttacagaagaggtagctcagaacatgctcatgtagaccataacgctggtctctatttaaaatgggaatgcttcatgggtgagctcagtggtagagagactttggaagctcaaagctctgggttcacctccaacacagaagaaaatgaaaaacaaagtgtgagttctcatggcaaagcaaaactgtaggtcttttctgcatagactatgaggacacccaccgaccttcacctcccctgacactggctgggcacagacctgcctccaaccctaatggcaaggttgtaaaggaactggtggctggttaaggctatttgctgagcaaagacaagagtctttgagttggagaagaagagactggctgggaggtagagtggagcagagcagagagaggccctgattgagaagggagtgggggactaccccaattctagcactgctacaaaatgggagagttactgccgcacaaaggcccccttgaactgcctgccttccaaaagctgtactgcactctctgcagttacttgtgtatggcagaaacggcatctttgtattatatgaacagtctgcttcataatcaaataccatctgtcgctacatctgaacttgttttcaacatctgtgcgttctggtcttaacaaagctttaaaaactaattcaaaaactttcacagatcactggctaaatacgtgcattgaccatctttcctggttggtgtgccatgcctctcctataggtgcctccctctgccccaggaagagcgaagatgtatacactccaaggctttattaagcttatttcttaatggcctcgggtagccaagtgcaagagagggacacttgctcacgcaccgggaggacccatcatattctttcctggtgccaatacagtccctttctgccaatgagaaacctgtaagttgatcagttaccataccccaattactcaaaatgacactacagaccaaacgagaaccaaggggagaatcaactgcatggctcgtacgcagctaaagtgtgtctgagcaaatggcaaagcggagccctgagagctctctgggggataagggcgctattactttgcacgtgcttcagcaatgggaagagtgtctttgcagaacttttagccaacctcctggcagatgttgaccgcttttgcttatgtatacatcagttgcagaacactaaaacagagattggaaattttaatttagtcgaggcagttgggctaaaatgatgacttttgttgaaaccattaaatagagctgtctaatgaaggacagtacggggctggcaaacagaaccctggtgggaggcctcggcttccaagcagaagagagggaaggcagggccatgagcctcggagtgtaggcagcatggcattctggacagggctggaggggcagggcagagcagggggagaggacagaggagcttggaaaggaggagaggtttggctgtgcctaacataaggtgtgtgtgtgtgtgtgtgtgtgtgtgtgtgtgtgtgtgtgtgtgtgtgtgtgtgtgtgtgtgtgtgtgcaagagaggcatgttttgaagcaagcaaaggttttattttagaagcatcttttaagtttcagaggcacatggcagacaagcaggaaagtgtggtgcaatgggcagaggcgcagcccttgaaggagaagtgagaggggaactagcagggaaggtggtagcccaaggtgggaagtggccatgttagtatgttagtgagtctgttgatttatcccgagcttccatctgctgaggaaagacacctgaaagccagccatcatcaggtgtgcccaggcttctccctccccggggaagtagggtcagcagtaaagcagtaaatctcggtactgatggaaactcaagttagcatggcggaactgactgataatagttgggggaccggccatcgactcctggcacagtgtcggatatgttaaacgccactgggctttgtgttttccactgttttcctgcttagtggtaatttttgccatgtgatgatttaacactgtagtagtcatgcatgtttataaagatacaaatgagactgcattttagcaagcatggctgttattaagcttcaaccatttgcagcatgtgaacaggtgaggttgtattcagtaaacagctgttactggctagtaatacagaatgcagtgcaaggcccagcctctgacatattggaaggagggagaagagagagcaagtgatttgcagcaaatcactgcttagtttgaaacctactaggtcctactcaagtccccaaagcacacaggttcattcgcctagaaacagaccttttaacccttcatgtcttcaaggaccccagtcacttactggtagctacaggtctgactaagattgactgagcaggatttaaaaaaaaaaagagagaatgcagaaatatggaatgggggtgaagaagccctgtgtgtgtgtgtgtgtgtgtgtgtgtgtgtgtgtgcacgcacacacacacacgcgcacaagtgtaagacagaaagagaacaacagaggctgccattcctcaccttgtttgggggtctctctctggcctagaattcaccaggtcagctaggctagctgtccagtgacatagttagtgtttctatggctgtaaggaagcagtgtgaccaaaagcaagttgggggggggggaggattcacttaatcttacagcttataagtccatcactaaaggaaaccatgacaggaactcaaggcaggaacctggaagcgggaattaaagcagaggccatcattgaggacagctgcttactggcttgcccattcttctttcttatagcacccaggaccaccagtccagggatggccccacccaccatgggctggatcttcccatatcaatcatcaaacacaggcttgcctttttggaatctgatgagagcatttttatactagaggttctctcctcctgatggctccagcttgtgtcaagctgacataaaaccagcacagcacttgagcccagggaatcttcctgtctctatctccccagaactggagctgtgaaatgaaccaccactccttgatttttttaaggtgtctgtttttatttattatgtacagcacgagatctcattatggatggttgtgagccaccatgtggtttctggagattgaactcaggacttctggaagagcagccagtgctcttaactgctgaaccatctctccagcccccactctctgctttttacataggttcttctcgggctccatcttgagtctccatgcttgtgaggtcagcacaagggcagccaggagttctaactcaaagtaccctgtggtgaccacaaacagcgccattctgaatccaggactcatcttccccaatgtcctgtctccatttcttccttccaaatgatgtcaataattatcttgtccagaaaccaccaactttcacagaaagccgagcatatggtggatgggaaagagaacaccagggagtcaccagttttgccatgtttctgttgcaaaaatgatttcacttgggaatctgagttgcaatgctgtctcttcacagagtttgaggaagttttgtgataaaatggcagttcccaaagtggggaaaagagctcgtccagctcattcaattgcattggcctcttgagtacatcaagcttgctcaagaaacctggcttgatttgaagaaactatcctttagttctgggccatcagggccctgttcccacacccatctacaccccaagttctgagtctcctgggccactccgtgtatcttaagctatcaaggatgtaggagcagagtccctgtcccaaactcaccagacttcctgacccgacactaggctattagtaagaattgtgacagatctgagcaaaatgttgttgctatctgtagaagaggactgtggaggagtggtggtagacagaggtgctagaagaagattttctttgttttgaagtattttgtttttttaaaaaagggggtggagcatctcaatggagggagggaggaagggagggagggaggggggagggagggagggagggaaccagaaaggaaggaagccaggaaggaaggaaggaaggaaggaaggaaggaaggaaggaaggaagacaggaaggaagacaggaagacaggaagacaggaaggaggaagagagttaaaggaattagttgcctgcaattattgtgtgagatgagcagaacttggtgtttcttgcatggtctggatctgcagtataggcatgcccttgttaccaagcccatcccaaacatagtgtttttcctgaggaacagggtatgctgcttctgccagggacaggcttagactcctaactcatcatgcgaacctggcagaagcccagggataaaccctgaaactcgagcatcctaggagacatttctgcctcttcaaggtgagcatcccgtgaccctgccactctgtgacctccattctgggcacagatgttttgtgaacaccgtgagtcactagccccttaaaatcctcctgtaaacttgaaatatccttcaccctagctagtaaccatggctcaggtgggcaaaaaaaaaattctaccagtcacttctaacttggattaaccataaatctttcacaatggcagaaatgcatttcctctttcacagtggagtaagcaaaagtcacttcagtttgtataagagatatttgtgtactgttttggtaaatgtcagaacacctagaacttcatcagaatgtattcaatgacagccttggcagagctggccaggaaagttctagaaggagaagaaggagcatcctttattagatactgactatatatatatatatatatatatatatatatatatatatatatatctggttctctggtatggagtctgtcccctacctgtgtgactgagttctgtctataatgtttcctagcaggtcctataaatattcacatttacctcacaagagggagggacgtactaaaggcaagaccatgtataggacactggtgtaaagggaagggaggaacactccagttaggttcagtgtggcatttgtgtctccaaaggagaaaacattaggctcaacttcagaagccaaaccatttggagggtggggaggaaactcgggctctggcggacaccggtgatctcccttccgggatgtgcacactgtcagtccagctgcagtttcctggtacagtttccaaaatgaagtcagaagaacatttggaatgctagtttacagggagcctgagggggtgggagatatttccctttacttccccccctaatttttaccccttttatctatgtttcctgttaactttagagaaaccaaaattgaaacgcctgccaaaacatcacggtggattttcacttcaggatgcattgttgtgatgacacagacggatgtaaatatggcttttacagacacaatttttattggtaagtgctgacagcagactgtgtgtaccatctccagacataagattttcttttttcttttctgattcattcttactcctgtgctgcttttgctatggagcctctgagtatcccacattttatcttgcctggggtaactggagggaaggaccacttctgagaaaaccatcctacccagtgccacatagtgatggatgcgtgctctgagctctgatcactacagtgtgcaattgtagctctccaggaaatgccgagttccttggctactgcgcagacagatttcccacctgaattaaacagataaactgattaatggctttgtggatttgaagaccctcaacttcagtgacattgggcactactgaactaaatataaagaatgtttttgagtcacagtagataataaagccttgtagaggacggcaacatcccacgaatgtttttcaataggtctgatgagggatccttccaagtttctcttattggttgatgagataggaagataggcgggtctaggagatgaggagaattctggaaaaaataggcaaagagaggccctgtgaggagacaccatgtagagaccaggacaatgggtgcaccaggcattctctggtaagataaggccatgtagaaatacctagagagagctagccagtgagaagccctagccatcggtcaacagtttataattaatacagcgtctatgtgcttatctgaggctgagaggtggctgtgggaccaggtgggacaaaacactccagcgatataggtcacaggaatggagccttcaaaaagatcaaactctggcctcatgaacatattgttcttttaaccccccaaagtgtcgatgaaacccccaggaaaagagcgcttgaagtaggcacttactgtgtgaacacagtaggcgctgactgcctcaacaaagagccctagagattggactgtgtgttcactgatgcagtggtttgtcctcttcaggactgccactttctcagcagtagagtttgccgtggtcctaacatttattgcttttaaattcttgctgtgtctatgtgcaggggtaggagtaggtgcacacgtgtgtgcggatgttcatgtatgtgtgtggacacacatgtgggtgttacgggtcagcctcagccatcacccctcatgcactatccaccctgtgttggttggttggttggttgaagatggagctcagcttgcagctctggctggcctcaaatacatagagatccgcctacctctgcctcctacattctgggattaaaggcacatgccaccatgcctggctgtatccacctgtgtgtgttttaggacttggagctggccaaccactgagccacaggcccctttctgtctccatcttctcagagctgggattatagctgcacaccaccacactggctatttacgtgtgagttctggttatcaaactcaggtgtttgtgtttgtacagcaagcacttaacctaatcagttcttacccacctctcacatttaaatcctcacaagaaagcaccagggccctgctggagcccctgggaaccgagctgtctggcttcagggggcatcattaaggaacttacccaactgctattgtctcacaaaactctgcttttcttccttcaacagtagatgggaagggagaaaaggaagaatgaaggcagaaagagaggagtgagaggagtgaagagaatgcaggaaaactggcaactcatacatattcagggccgtccacttttttttttttttttttttctggttttgaagacagcccctccaatcaccttgctttccgctgtgctgagctgagagccatctgaggagaggcagaaagaggagtcggccttgctgacaagacacactgcagcatctggggtgctcctgggagacctgcgggcaggctaacctggcctcactatgctgagcttgcaaagcctagaggatgaggtcacatttggccatgactataaatagacaccgggtggcaactagaaccaagagggagctctgcctgtgattcgcagaatggcatctgtgcacaaagaagccggcatgcacagcatcacccagtctcaaggaaagcacagccaagtggaaggcaatgttgacacccttctcttggacgcatctggtctcagcgagacttcctgtggatcctagcgtcaggatgagaaaggtcaccgcagagtccccccgccccccccccggcctaagattctctaagaaaaattgcccacaatgcatcacagagaaagcatcctggtgtacctccaaccggcacagtgactttacgggggtcgggggtaactttatatcaaacacagttaggcacagagctccagtgtggtgattagcccctgccttcctcagagctgctgatataacactgcaaaagtctgagagcctgctcctacgtaacaccttagcagaggagcagtcccctcacccccagcacagcctgtaagaaccagggtccaaccctcggcagccagcacctgctgctaccaagtcaccaagaaagcccacataaagtgggagctgggctcttccgctgcatagagcacaggcctcactgggccttccccttccattccccctccccaaagtccagcctgtgtatccctgagcctctgaactctccccaacccaagctacagagttagcccacactggcatggaaacgggagcccaaggcccgagtgctaacattaatatcaggctctgagcaaatcctgtccaatcagaaaattccagaacaactctccaaagctgccatctggaccagcaagggtgtcatcacttggagtctgcacggtagccatgtttctctttgtacagatttcatactgccccctccccctgccacctcaccccttccctccgtctgcctcctctccatcttctccacagctctgtcatctgagaagccccatctttcctcctcatcatgtttaatttttcatatcacttggggacagatcacatatttgttgtgacttaacctcctctgacttggaaggagctgtcaccttctcctcctgctctggcagaatctgccaagcccagaatgtgtgtgtgtatgtgtgtgtgtggaggggtgggtgtcttgttataattcctgcgctccgccagaagagactgcctcaggatgccacaggtcctcagactgccttccacccgttacccactgggactagctctcaggaggagtcagggcgagggctgcatgatgggtcttataaacatgggaactcctctacttcttactcactaggatttagagggtttggatttggtaaaatgtgtatgcctgtgttcgagtctccccaacatgccagggatgtgcaggtgttagaaaaggggccactctgctgccacccaatcatggtaggaagtcacacctataacaacgcttaccatggctttgtgtggcccatttaggagaaatgggctccatcttcaaaatagcagaagggagagagagagagagagagagagagagagagagagagagagagagagaccattgttctttcaggatatccttaaatctggctggtaaatgttgaacaacctaccacagtcccctatggtggcattatacacagaaccctgtctttggagcatggctgccccatggtatggaaacatcaggcagctgggtgctcctcagcatgttcatctgtcatttgtttacgcctttgacatagatgactccccatccctcttgataccattctccagtttggatcagtacagctggcatgcttcagccatgttcctttttggctcattcaaggcagaagcccattattttgaagtttcttcccatccttactgcttagagttgaccacttcctttgtccataaatacctttaggaagagtcaacctcatcgctgactggatagtttcaagcaagctgcttgccactcatggctctgatgggggtgtccttctgtgtatatgtttctcttattggttgatgaataaaacactgtttggtcaatagaggcaggaagataggcggggctaggagatgaggagaattttgggaaaggtaggcagagagagaccacaagaagatgccacataactgaggaaggaataacgggtccagacattctccagtaagacaagaccacgtggaaatacatagattaatagaaatggattaataatcaaaagagagctagacagtaagaagccctagccattgtccaacagtttaataattaatatagtgtctctgtgtgtttatttggggctgaagcagcaggaccaaatggctacaagaaactaactccagttacatggctccattcttcccttctcttaaatgagagaaatagtcatcatttttctacctataccctgtgattttgtgaaatccaagaatattagttaatttcctcatttctatgatcacacccttgagaagaaacaacttaacttcaaggatacacacaatccactatgctggggaagcatggtcacaggaggaggtgatggctggtcacctttcacctgcagtcaggaagcagagagagatgagggcgtcagcccagtgcagtcctaggtgggggcctatggaatggtatcacccacattcaggatgagtcctccttgctcagataagccttaaaaacaccctcatagacacaggtagaggtgcatttccatggtgattctaaagccagttgagttgacgatcatgataaaccactatatcaaatgataaaaaattgcatgaacatgtagtataagtgtcgagtaaatgattcataaataaacgtttgataaaagttttataaatgcagctctcacaggggctacccatgggttttttttttttccctgtcatggtgagaatattctttaatgctgtgaacctttgtgtagttcacctatcaaggcagaaatttgctttgagatcttgagcaaaagatattattgtcatactagaaattaccatgatctaattaggcctgcctccacaaatctgtcacttgaaagccattcaagcctgctcagcccagcccttgatttaaactgctccaggagtctagccgaagatgtgtccaggatacaatccaacacaatattctcatctcctccccctgctccctggaggatgggctgctcaccaattttggccacaataacagtaatgtagaagagagattcattatagtttgggcatagatcttaaccagtgcccatgcaacctcatgacaacattatttagcatacagacgagatgtgagctcttattggaaagagactatggctgaagattagcatggtgaggcacttgaagcaaagacaggaaagatgcatattttcttccctgaatggacaggtgtagccggcatccctaagtatgatgaatactctgcaatgacacagaacacagaactctggtatttaaaaaatgtagatgcttgccaaatcaagaatacccattcctgaatgttatagctgaagatgaaagagttttacaaaagcagatgcagaaggtaaaacagattgctttcctattgggcttgagactgtgttgttgttgttgttgttgttgtgtgtgtgtgtgtgtgtgcaagagcacgcacgcgcattgcgggcataaagaccagaggtcagcctttggtgtcttttgttcctctggtaccattgagttgtaactcactagtagcctgagctcacaaatgaggctaagctggctaagaggcattgtcctctctctgtctccccagtgctaggactacaagggtactccaccatgctaaaattcttaggtagggcccaaagctagaactgaggtcctcatgtgtacacagcaaacattttatcaactgagctctctccccagccagaggacatgcctttcaacttctctttagtggtatatggctccaaggttctgggaacctgtgactgacaaagtcccaacaccattgaatacttcccccaagattgaagaaagtagaaccctttccggttgttccttttttaaaaaaaaaaaaaaattgtttgtttattttttggatttttgagacagggtttctctgtttaacagtactggctgtcctgggactcactctgtagaccagagtggccttgaactcacagagatccacctgcctctgcctcccaagtgctgggaataaggtgtgtgccaccatcgttccttgttttaataccctccccatttctgttattcctgcttccccacccttgccccactatcccaaaacatacatccacacctctaccttcctatctctctgtaccttgtcccaggcttttgagtttcaaagaaatgctgtttgtgtcaagcaaacagaaagatggaatatcaacagagcttattaaacagccagcagactcacatcctcatgagctgattacgggctgggagaattcaattcactacccaaaagtcggcaagatatgcctctcatggctttcatctgtaagccagagctggggagaaggtagaattatcatgtaactgaagatggcgtttcactctgaaggatgaggaggcagttgagatgggaaaatcccaggagaccatcaggtcgctctgtcagggtttgagtgtggtgccagccctccctgcagctggaaatggggggggggaagcgaggtcagagcctctgaaaactcccagggggtccccatgggacttgtccccaccatgtgtgaagattttgctagcttagttcttgcttctaagcagctgacaatagggagatctagcgtgctctcatgcaaaggggcagagacgattagtgagggggagggcggggagaaacaagatcagagggaaggagaggagaattcacccagaaagggccacttagcttcccttccacaagattcagattaatggggaggcgagtgcccacccacatcaaggagacccaagcttcgcaagcgcctagcaggaaaggcggtctgagaaaaccctggcagagactggaagcctggcggaggaaaggggtcaagtgaacattttcaaaatgaaaagggcctaaaaagagaacagtggaggctctggcctgcgaggtcgaacagcactctcatggaccgagtcactaaaatgctgggagacgaaggaggaggagggaacaggcctttcaagttttaaggtcttttctttctaaaaaaaaaaaaaggaagcatttgagatacagggctaaggattatttctgtctattttgggagacgatgctggtgttattggattccaaccagcgtggcagtgaagagatggtagtccagagccatcctgactctctgtgactaagagtggggccttctgagctgagcccaggagccaggcacaactggacacggatgtgtgcacaagggaccctgctgcccctgtaccccttgaccaaatgtccaaggtattgttatttatggtgctgtcatttgggactgttcctcggtgatttctccaatctcaagagtttcctcttgggattggagaaaaagataaaagagaaaaaaaaaaaaaaaactacgctctggactcaatgccaacccgagacagctgctgatgtcgcacaacaacgtcaaggccctgctgcccctccctgcccctcctcctcctccacagaagactgtgaaaaggccaagagttggtgggcggccagcaagaataaagaacttacagctggcaaaaccacctgtgccttgtcaaattccagccaaaacaatcctttccccagagtctctggctgaagagcaggggagagaatctgataagaagctgggggaggagagagaaggacccactgaccatacctagccagtggagggagaggatttaggagttgcaccaggaaaggtccaaagatccaatactatagtcgtagaaggaaagagcagcaacccggtcaagcagctccggctccaaattcctcccctcactggaactgcagtaatgctgaccctgagtgaagccagcgacaacacaaggaaggtggcatgggttcacagctgaggtgtctgtgggaatgtttcagtagcaaagcccaaggctagtcacttgcagtattccctgtaaatgcatggtcaccttggggatggctgttcagaaggcagggtcccatgactagacttcataaaaggtgtgtagacctccatgataaagaagacatcagaggaccagggagaaagagtcttatctgaggtctatgctggagttctgtctccactgggtatactcctctttagacttctttcccctatacactggaaaagaaccagccctaactttagttgctatggtcccagcttcagtatttaagagttaataaatgctgcctctaaaattagaaagtccccttgtccttttagagcatctaacattgttggtgttggccaggtgatgctggcatgaaccagagagttgattgcctctagagatcaggaagttattccgatgctcagacttcattttcaaaatatttatttatttagctgatgactaaatcaacagagagagtatgttgactcctaggacgatgagaataatcaggacccactgtgagtgccagcaatagcatgtcattcatcaggggacataatagttgacagtgacaatggagagacaggatggtttcgatgagtattaacaacttagttataggtacattcatgacagcaaatatgacttgtttattaaagcactgttcttctacggttttagattatcatcatcaaaaatgagtgatttaatgtaactacgagaaggcactaagccagcccagactggcggatgctctgcaacatagctggcctatatgcatcaaaacatgtcagcagagcggcccatgagatggctcagcaggcagaggcacttgcttcaaaacatgacaatctgagtttgatccctgggatccacagggtgggaagagagaagtgactcctgcaaattgtcctctgacctgtatattcacacacacacacacacacacacacacacacacacacacacacacacacacagagtaagtagtaattaaaactgttaagatgaagaaagacacagaaagctgaggaactgctccagattgagacgaaagagccatgacagctaaatgaatgcatgaccctgaggctgctcctaggccaagagcaggaatccctgggaaaatgatgcaatttgaatatgcactctacaataattaggcattagtgtttaacttcctgattttaatatttactgtggttaagacacggactgcttaagttctcaaacagcttcaagtctatctttcctaaaagcggcaagtttttgctggagaaatttggatccactgtacataaggaggagaggcaaagtcagccccagagaatttgtgtttttatttttataggtttaattttttggtctaaattctaatgatattgtgtagttaaacaaacaaaatgaaaagaaacctctggggtttatattactttcgcttgttttatgtgtatgtgtgtgtgtgtgtgtgtgtgtgtgtgtgtgtgtgtgtgttatccttatgttttgggtgttggggagatggctcagtaaataagagtacttggtatgcaagcatgggaacatgagttcaaatcactagcacctgtgtaaaaagctgagtatggctgtgtgcttgactgcaccccagtatagcgaatggaggagacaggtggtcactgcagcttgctggtcaccagctgccgacaaccagcctagctctagttcagggagagactttgccttaagggaataaaacagagtaatagagcaggacatccaacatcctcctctggcctccaggagcacaactgcacacacacatatgcacagataccacacaaaagcacaatatacatcatacagacagcacatactccacgtatataccatgtacaccacatacttacattgaatacatatatacatacacacatatatacatatacaccacgtatgttacacatgtacactacatacatcacacatgtgtaccacatacaccacacaggtacaacatactcacataccacacaggtacaatatatataatacacatgtataccacacacatacaacagacatgaagcacgtaggtccaacaccccccccacacacacatacacacacacaggatcagtgagacattctcaactttcttcttttctatgtcatttcttgggcaggagagatcagcgccctggaccaccttccgagtcagcacatataactctatctcattatttctaactcctggggctgctgagcagtgctcacaatgctcattttgatggagccctggcaagcgagcaacgggagttaacatccagcctacattccattcagcaaatcacaacgctctccacgagctctgccagccaagaggaaaaggtgctgttttctcctcacacaaaggcggtcttgtggcagccccattagcagctcctcagcactctggggtataacgcagtgcagcgtaattcactcatataatctcaccctaacgtaggcacagcctacattgctcttacaagcaacctacaacttgagtggtccttctgtgtggatctctgcattccccacagactcttccacagggaagattcccacactgtttcctcagagctgacaaattaaccttgccacaggtttgtacctgttcatgctcccagcatgtgtaggaagtggcttgtttctgtaccctccaaccgacaccatgggagatcaatcttctaaatatttgccaatctgataagtgaaaaattttatctcacggtttcatagatcatttgtagcaaaccaaatatttttaactttctgttctccaaatcaagacaattttaaaggagtattgagtctgtgttcttcccaaatccactagcaaggctgactcaatccacgagcgcccaagaatcagcagtgtctacccaaccactgcccctcagctcagtctcatctgctcctgtgtgaaatgtgaagcaaaaggaaatgtgatgcctgacgagtgttggaagcctaaggtttcaacagaggtctgctggcaactgattttctgatcacaaaccccgatcaaatcttactgactgtgccagctcgtcttggtcagccacctcagccccctttgcaaatgtagcagctttcattcaatttgacattggtcacatgagcaggatcacgtgtcagagagaataccaagcctgtggtgaaagcagtgagggaaccaggaagacccgcaagtggtgccaaactcacctctatggatggagagtcagtgaggccagatctttgaaaatgccatgaagttaaagttcaatacatctgaggaattctcagagctaggccagtcatcggcagaatctggctgggagaagcctgtgggaagagtagccttggtgagtgtgtcagtggacatcaggacacagcagtggggcccttcccttccaccccctgaggtcagaggccccactgaactcaatgccaagatcactaccacacagtatcaaggaaataacctgaagacggaagctgagcaaattatcaattcagaaaacataggatctgtgtgtcagtttgagttccttcctctgtaacttctgtgcagcgatttactttagtatcagaccatgaaagatggctgataactgcatgacttctaagtgtggagaataagagatgaagaccctaacatagaacacccctggcatccttgtgtgggaatcgggacttgcggggttgaggagactcgccagcaaaagtgtttgctacacaagcacaagagcctgagtttgggtccccagaaccctgtgctaaagtcgggtgtgatgacgaggcctaaccctcacgctagggaggagacacagacaggcagatcccacgagctcggtggcaagtgagccaagcagaaaagatgagctctgggtttcaggagagactctgtcacaaacaagatgacagggacggaagatagcgacatcaacctttagcctcacacgtgcttggacaccctcatgtgcactcatacacatgcacacacacatgcccctccccctacacacacatgcacacacacatgtacacacatgcacacacatgtacacacatgcacacatatgtacacacatgcacacatatgtgcacacaccacatgaacacacatggccccctcacaccccctacacacacaaagtatacactgacacatggaaaaggtttcaaagaaaccagaataagcaaggcttaggtcatgaaaatactacacgacttgggtcataatgaagagcaatgaaaagggaagaaagaaacagaaagggaagaggggtgtggcaacttggagataactgggaaatcgtcagccaggtacccaagaagacagtccttctgggtagaaaaacacatcatgcctgatcatcaggactgagttagttttctgaaagcgccacagtcagactagacatatgtatatgggttgtcagtttcctattggatgtgtaggtgttagactgggtgtggtgggggaggggacattaaacactagggcagtgcttctcaaccttcccaaagctgccacccttttacacagttcctcatgttgtggtgactcccaaccataaaattctttagctgctacttccttgctgtaattttgttactgttatgaatcataccgtacatatctgatacgcaggacatccaggacatctggcctgcggcccttgtacaagagtcattccccccacaggggtcgggacccacaggctgagaaccactgccctggagcctctctgccggtgtgcaaccctgtgattcctactcggtctccaggaacatctcgctatgctgaactagaagggaaaatgatcccgtttatcttgttgaattcacgtttatttttaaccaaatattcatttaaaagttcacaatcaagaagtacgcatcagccaggcgttggtggcgcacgcctttaatcccagcactcaggaggcagaggtaggtggatctctgtgagttcaaggtcagcctcgtctgcaagagcgagttccaggacagcctccaaagccacagagaaaccctgtctcgaaaacaaacaaacaaacaaacaaacaaacaaagaagtaggcatcaccccctgcttggcaaataccgtcattgtcagactgcatttgtatctggccagacttggccttactgttcagactgtgaattcctcagtactgtcctccagagtaggaatattttctacagccctacatctctcatagcacagtcatcattcggttgtgtttgccaagtctataaatatgtgtgccaaggtaaagtatttgggggctacagagctggtgccatgacgaagagtgcttactgctcttccagagtcctgagtttggctcccagcactgattcaagaaggctcacaactgcctgtaaccctaacttcagagggtcagacacaacctccggcctcattgggcatctgtgtccatatccacatctctacatacagacatggaatatacacataaataaaaacaaatataaattttaaaaccatgtaaactatttcacacacaaacctattttctttgattttacaaatccgtttgccctttgacatacttgccctgatggatttcttatcaacagaccctttcatctaggtcttctcctgataaactttttggctctcctcctagctctctgtcccttcattctccttccttgtctttgtttcctatcatctctcagtttgggatctccaacactggtctttctagaatcttccatcccacggtttctgagatcactgctaaataaatgatcctatttatatcctcaagctgcacttagcttctggccctccaacttcctctaggatatctcccctaaaattctctgccatccttgctaattctgtctggtcccacacattctttcagtgtcacttatcacctcccaacccatcaacagccagcactgtcttcccttcacccaaaggaagctttggcatctgaactcttgttcattcctcttcccgcatctaactgctccgtgggaagaatgtttgctgtggaagcatgaaccgccgtttagatccagcattcatggaagagcaaggcgtgactgtggtcacctggaaccccactctatactacttgctgttcatgttgccatgaccacacacctgacaagaagaaacttaagacagaaaagacaggttttggttttagttcaagggaggacagtccgtgaggatgggggaaggtaacagcagccagaccatgagggtgaggtaactggttacccaccatcagtagttgggaagcagggttcagacaggaagtgggccgggatgtaaaacctgagtgacccacttttgctagcaagactccaactcctaaaggttttgcagcatccgaaaggattgccacccgctggggaccacatgctcacatgtgagcctggaggcaatgacaagctgcatcaaacttttacaggcagattctgcattggaacacagctcaacatcttcacaccaagtctcttcttccttttccagacaagactgtcctgtgccttccccagcacctcggtgaacttgggttttatgtccttttctagtctatctgtcctcttttcaacactgctctttgttcgtttccaggctgccaggatggctctgggggtaaaagcctttgtagcctgacagcctgagtttggtccccaaaatccatgtgagagtgtcaggggagaaccaactctacagaattatctcctggctccacctccccacacacacaattaacaagtaaaaatcttagacatatcagccagccaatacaaaaaggactgagcactatggaataagacagaactgtccacttaagttaaaatttgaggtactgttgatacttcctaaaagaacattactttttgtggttctgaaagagcatggcctttgtggttttttgcttttttttttttttatgttgaatgtcaagtacatcagacctctagctttttctcacctatgctatgtctaagccacctgtacttgccgtaccagtaagagcctgataaatgccctctgctgttcttagacgtaaacaataaactgggtaagtgtaactctcacccctcaccagagagagctctttctatgaaagcaagaggccacctagcaaggtcaccactagtacagtgtgctagagtaagaggcggagcttctagaggggatgcagccacctctcctggtgacaatattcagcccttgtgctttggtttgtaaagcttcactcagtacctgctatcttctccttttactctccatcactcaagtgcaccatgttccttcctccctggaaggtggatcaaggcgccatcttggaagcagagaatagcatttaccaggcagagggatctgttctaactttgcccttgtactcccaacctcaagaaccacagagacactgttctttgcaagtcactcagtggtggatgtcttcttacagtcactcagtggtggatgatgtcttcttacagtcactcagtggtggatgatgtcttcttacagtcactcagtggtggatgatgtcttcttacagtcactcagtggtggatgtcttcttacagtcacacaaatggaccagcatcctaatatttcccatcatttttcccagttacacatataacatctctcctggtctcagacatgtacttgtaggttggatcaagaaagcaatagtggctatgtagcctgaactggccatctcctgtgaccaggttggtgtctagcccaattgtcatcagagagtcgccacccagctactggtacagacccacaaccaaacattaggtggagttcagggaaccctgcggaagaaggaaagaaaggactgtgggagtcagagggcccaaggacaccacaagaaaactcacagaatcgagtaacctgggctcacagactgaactgacaaccagggagcctacatgggactgacctaggcactctgcatatatgtgactattgtataggttggcctcttgtgagacttctagcagtggtaacaggggctgtctctgactcttttacaggcttttggaaccctactctccatactgggtctccttgcccaaccttaatatatggggaggtgcttagtcttaccgcaacttgatatgccatgttttgttgatatccatgggagacctaaacagaaatagaggagtggattggattgcagtaggaacagagcagggtgtggggagggaataggaggagaggagggaaaggaaacttcagccaggatgtaaaataaataaataaatttgtttttttaaagaaaaatttggtcaagtttgttctttctctgaaaacatgaggctgttctttcttgtgaagaatgtagctatttttgcttcactttcagataaattctctccatgacagcctttgtctactgatagcggcaactgaacaggaaaagactgagttaaacttaccctcaacccatggcacacacatgagcatacacacactcacacttactcagacatacacagactcagacatcctcactcacacagactcacacacccagaccacttatattcacacacacacacacacacacacacactcacacgtgtgtgcacacactcacatgcatacatattcacacacaaacactttcacacatacagtcacacactctcacagacatacactcagacaagggcacacctacacactcccacatgtgtgcaaacactcccatgcacgcacatacccacattcacacacacacacgcacacacacacacactcactcacacgcatgcacctacccacacttacatgctcacacacacgcacacactcatatacatgcacatacactcacccacccctgtgacaaaccctatcttgtttccatccttccaacagccttgtttagaggcacctactaaatgagtgcatgagtgaggacacaaaatccaaaagctcatttaactccagttacaccacaggcctgtgacgacctgtgatcactgccctgcatctcctactgagtcattgtccttcactccttccagggttcatattttcaagtctcaagtagtgacgtttcttatccaggatgtcagatgccacacccatttcaaagaccaaccgaggattgtttccatcctctttgagagcacgcctgtctctttcttaggaactcttaaggacagtagagtattgtcaagcctagggctcgacagtttccctaacccaaacttttgttgcttttcatgtagggagaacacttgtgcagatgcagtctgcaggcacttctcgtctccccagttcctcaaaggcctcagagtacacgtgctacagacatcaaacccacaagacctttgtaagctggaattgaggtttgcttagcagtaagttctttctgtatttactccttaaaagagtgttatttccactttcaagtcacaggaatcaaatgtttgccagtcacctgcactccgtgcaatgctgggtgagaagacaggagccagacaccagagtcctggtcataaggaccccagagaccggtggaagcagactctttcaaccgggtggaagacagtgtactagagacggaaacaaactggtggccgagaggaagttcctggggacgtatgaaggttaattactgctgaggactccggtgtctgaacatgactgaagtctgtgtgctaggtctagaaagatgacgacaatacatttgccaaataaaaatcttaaatggataaaatccagaaagacagcagttattaccatttttattcaaaccatttccatatccctgcccacagcttcttcggatacaatattcctactgtcctaggtcatgtcaacccctcagcctagccttcgaggcttccaccagcctggctcactggcttgctcaaccagtgaccccatctatcgagtgcacatatttcttaggcactaaacgcgatgcaggaaacaaaaccatgatgtgctcacttcaaacttacttaacctgtgtctctaggaagcagacctggaggaggagaacagataatgagaacataaggaattacaacacggagaaaatgaaatatatgaggaaagtcaaggagagaaaacaggtcacaaattccaagaaaaaaatagaagggtggaggaagagacccttggggagacgccattaaagagaaatcaaggcgccggtgggcaacagcctgccaggcctagaagtcagagtacagagctgtaccaggatctgcattaaaacatcagggttggattgggctgcagccaaacgttgagttagagtagaatggcccatggtgctgggggtgacacacagccaggaaggggtaaggtttgctttgagagtcacagaaatgagaggaggtgactgagcagaggagtgctgtcacccaaactgtatcccccagaggaattttgtctgcaagttatacgcagacccagaaggcagcgagcgataataaagagcagttaggagacctcgagctcttccagccgaccaaacacaggatttgggttaagctggggtgccatggtagtataatactgtatttttggatacagcgttaaggtaagcgtggaaatatttgcttattaattcaatatggaacgaaaaaggggagaggtgtaacaccaaaggtttggacctgggcaagaagtttgcattgccatttactaagatacaggagaccactagagaagcaggcttcagaaaaagaccacttcagcttgactcagcctttctcatagccaaacaatgagtcaggagcttggagagagtcctgggctaacgataaaaacaggaaagttgttcctttccttgagacgcaacaataaaatgctacagcctatgcgactcacacagaaacatattgcctatggttcaggagacaagaaatccaggctctggtgttagcatgcttggtttctcctggtgcttgcaagtagtcgcctctcctctgtggcttcaacatggtcatttgtctgtgcacgtgtgtccccgatgtctctttataaaggccactactcagactggattacagtccttcctaacaacctcagcttcactcacactacgggatgctcatccctaaacagtctccataaagatcctgatttcagcatgaatttgggggacaccattcaacacaggacaggcagccagtgagtgtagagagctgaaatggagcaggggtgctctttggtgtccacagatgttgtgtgacttacttttcatggggggatgagaacatccgtacatcccggatggggctgtacagagaaatgaccccgcacaaggccagctcagtgtcctagcgagacttccggggttccttagtggagcacagctgactcagaggcaggcttgtcaccggaaagcccacccggcatgagtggggactcacaaggctgcatccctggagctcttggctcaacttcaggagacttctccaaagtctcctgttctctggcaattgcttgttgcttgttcattgttgtctcaggtagtagcctcctgagtctctatgtcttcccagacttggaagtttgtgagcttcctgggtgtggtaagtctccctcctccctccagaagggaatatctcagtctgaagcaaacagccactggacagtggtgcctgcagagaaatggacaccaacaatggagaacaagaaggatgggggaaaacacggtctcctaagagccccacaagcacaaggcttgaaagaggaggcattacctacatggctggatgactctgagagacaaggagtacaaaaaccgtggtcactgcactagggacacccgtgtccctagcaacctgggtatatgcacttccccaggttggtggatcaggttgctgagggttgaagaggaattttgatgctgaattatttccagctcttgagttctgcaataaagaagagaaatggagaagccagagagcactgaggggtcacatcgagcattgttctaagataggggtgctgtgagcagataggagtgacccatgagtaaggggggaaatggattcggctggggatggctggagtggtggccttgagcagccgactcaaggctgcttgtagtattgagtagcagaagtgaaggggtttttcttatctagaaacctgtccatcaaaggcagagctcacagcacaaggaagagatgagagagatgggttacaaaggttatgtggtgtccctcctgggtgtgtataggaggagtgatgctgactatctgaggagagaggtgtacactagctgtgaagaccgtgaggcaggtggatggtgtaggaaatccaggatgggtgtctgatgctgagcagaaacctgaggttcaccgcgtgaatcaaatggaggcttctcactacagctgtgtcgttttctccagccatcttcagttaggaaggtgacagtgacgtgacgagcagactcaaagttaaatttaccctgtgttgggggttttccagataagtctgatgagaagaaactgagtgaaggagactcttacacagactgttactgcaaggatggactttgaaatcttgagtagaaatgaagagaaacaaggacatacgtcaggtgacagaaactggcctcatgatcactgggtacagatgccagctgagccgaaccactggagtcaaaaatggaaagggctgagaaggcaagaaaggctagagggtgggagtctgtctcctaagtggctgctattgctgaagaggggccatggattttacctgcctgcctactccgggaagtcgctttgttaaagctcacgtaaatgggtatctcttggagagtgagccaccctgttttcaattttgccatggcttcgggaaacagtggaagaatagtgggaatgtgttatcagagaaacactagctgagttcaagttcagactccctctcgcttcttggtttgtgggctcagttcttactcatggtgaggcccatttggctcatctgtaaaatgaagaaagcattaattgtcttgtggttattggaacaatcaaatgcagtagggtatgtgagtgtgctttgcaaactaaaaggccaattaacgataacctgaaatggccccaagatcatgaatcagccagcagagggagaagcatcggccaccaaggactccgcaggaggacctttagtctctcccaggctgtgactaagcccagagtcaagcctgtcagatccaggactccatttgcagctttctcatctatctcctgcctttattttatcccttcccaagcccagcagaggagctcctggggttgggaaggggatggaagggaaggagggaagcagagaggtgtgggggaggggtctctgcaggagaagctccctcaaaatgtccactatgcaccaagcactttgcagaagctctgtcctctcccaattgaggaccaatgtcgcctcccacttacagaaaggaaatgagcctggagagctcaggactgcttaacttaaccatccagcaagaagtggtagatgagtctttgtcttccctgaaatccaaagcccagggctctcccacagtaaaccagtccatagctcatccaagaaaaacaaaacactttcagggtgatttcctaaacttaaatcttcattttcacctggtggtggtggtgcacacctttaatcccagcactcaggaggcatagacaggtggatctcggtgagtttgaagccaacctgggctacagagcaagttccaggatagctagtgctggtgcacagagaaactttgttttggaaaaagtcttggttttctttcattcttaatgtcttagactaaaagaaacatgcagatagaggaacgatctagaatatcagatagatattctatattcaatatcagcagatagaggaacattttagaatatcaaaatcattaacttcttagagaaagaagttatccacctaaagtgggagccatttatatcatgaagaaaagttgtcttgagttccccttagcattttattggcttggaacgtctccgagaagtgtatgacattcccattcagccctttctcccagagctcatggtccggtgctagctgggctgcagccaactcaagacgggctcccctcccaagcagcttttgatgcccagtggggactgggtttggctaaggtgtcaatggcaatgcccatggggctagggctcctcacagcatggtggctgacagattcccaactgtgagttttccaagaagtgagaggcagtaattgtgaggtcagccacaggccatacccagagctatcgtgatgtcgattctgctgtagtctattagtcaaggcaggcagagattctgctttggtgtacaagggcagaggagtaaatgccactcactttacaaagagaggtgagtcactttcagaagataatggcaaatggaagaaatgattgctttcatccttagaaaatgaaaactacatggtcactagcccaggacatgcccagagtcacactggccctatggcagtgcagccgtcacgtcgcagccttcctgcccacggctcacaccattccctcgagctgcatagcacagtcgtcttgctattcatccgcgcctctgcagtggagccctctcctcactcttcccatgggctttctctcttaccactcaggtcccaattcaagtatcacttttcctgtgacatcctgagcgtagctcccttccatccttcacggcctctgtgtgctggatttctacctcccatctctgccccaaaactgacatacaagttctgatagaaaaaaaatatggtctatctcatccaccactgaggggcatctgtagtgcctctgcacgtgtctgttgcatcatgcttttcaagctttatcggataaaaaatgagtaaaaaggttggtagcctgccgactaacagctgccaatggctgctttacctgttctttgggcagtgggctctgtgtgctcctctggaacgctgtttatcttcagacaattcacaggcaactgttacgctacaatgaaaagccacttagggtctgggaagatggtttgatgggtaaagggcttgtagagaaaccatgcggacccagagttcagccccccagcaccctgtaaacgtcaggaggatctgacaaagcacttcgaaggcagagacaggatccccaatgcaagctggctagctggatcccagaattccaggttcagctagattggggaagacacccaatgtgaacttctgggtccccacatgcatgtacagacatgtacatgagcatctgcacacacactaatgacacatgtgtgaacatgcacacacataagcacacaccacacaccaaaaatttacctacctaatcaaaacttctatcatatatttactaatcatgagctttcaaactgtacctccaagggctttagttctgagtctaacctggagggaaaggcaaaggagaaaaggacaccaggagcccggtcgttatttacatcacagtgtcagtactttcaagtgttccatctattggggcttatttggaaaacagtcccctgctagaagtaactaattcaggcatgtccaaccattcgtcattgtgacatacattgtagtctacaaagttcaccttgagaactgtgtcatcaagttatcgtaattataaaaattaaatttcataatgtttggagtaaatttgaccgttttgagttagacacactcatagctttcctcagtggtgtgtgacctgtggtggcagagtggacacacatcgtcactctagttggtcttttcagtcctgttctagaccctcgcaaagctatttctcagagtgtggccttccatcaggcaacaccctggacacaggtgggggtctcagacgaactgagctcctggccacgaggccagggaacctgtattctaaccaccacctcagggattcttaggtaaccctcagatttgagaatcactgcaatacagcatgaagacaatctgataaaatgtgagtactgttattcaaatgggagactttcctttgggaagaccccttgttatgataaatctttccgccaaaagccgctgagccataccaccacatgggctttacaccagccgcccgcctgagttaaggcccaaatgaatacacagaaacttgtattaggtacaatgctgcttggccaatgactaggattctcatctgctagctcagtcttaattatcataaatctatatattttataagacttatcttatcagacgccttattggcatccctccttgccggtgggttacatcctaccgctggagcaggagcggaggggaaaaggggaccttcctgtttctccttcgcttaaatatgagtctccttgctatgtcacttcctgcctggatcagcacttctgtactacatttcccagaatcctctttgactcctagtcctgtctaatttgctgtctcattggccaaacaatcaataagataaacatacacagaagtatttcccccatcaaccccttgccttagaagttggctggctggtctcagcatatttaaatgtgtacttcctttgctagagggcctgatcacctccaccaatatttctccttagccaaggagctgagcatggtatgtatatatgtacaaagacacacatagttgccagcgtgcacgcacgcacgcacacgcgcgcgcgtgcacacacacacagttgtagtcagtgtcacagccaacataccgtctcacccagctgagtcccaccagttaagcacttctcagtcaggataagagcagagcccttaaaattccaagcataaaacagctaataagagtgtcttgttcaacaaagtaataaaaaataaaacagggacagagaaagctgtgaagttttctttgtgatcattgtttaacactgtatgtaattaaatattaatgaaagtatgctactttcatttggtgagcaatttaattcaattaaaaataaatgggtctccttggctcagtgggcatactgatatacagaacagcactgcccttaacttagttttcactgtgtttaaacccagcacagagcagcaaggctgactgcaacactgggcccatgcacttaacttattaggaaccaagaccggacctcagcttgacaatggagcatcactccctgtggcagccacggcacagtctattgtgctattccgctttgctttgtgggatggaggcatggaggaagtgtcatccaagtaaaagaagaggtagtttcaaggagactaccaggaggttggcgggtaacttacgcacatgtgtgtgcaatgacacacatgcatgtgtccacacatgcatgtaagtatacacacaagtcaacaagtatacacacatatacataagtgtactagaagtatgtatataagtacacatatgcagaaatatatatgggtttacataagtacacacctgcacatacatgtacacacacatacatgggtacccacagaagtttgtaactctacatgcattgtgttcattgagctgcacaccccagattagtgtacactgtgcacttgactgcagacattttatactggtgagggaaaatagtgtttttctgccctaaaggaccacctgcctctagcgttattcagtaccccctgcttaccatctgggtggttaagactcattaaaaaaaatactaaggacatttatttggtgtgaaaacatacacacatcttaaagtgcctttggaagacagagcaagcctgagggtggtatttgcagtcagacctctggggccagattccctggagtgttacctactgagagctttaaagactggacagaatgaagttgtggggtaggtctggggtcccatcctcacctccagctgatggtatgtccccagcagggggagggaggtgagactgtgtgcccgcaggtgctctggttgggcacaggttccaaacgtattttcaggatgattcttagaggctttggaggtcatgggcccatggcctccgtggtacatggactgtctgtacctcatgtcaccagcagaactgaggctggggaatgggctctggcattccacaggccatgtctaataataacaatgttatcaacactggaggctgagctggcctggagtgtgtggctgggtacccagaggccagtgcccagccctgaaaggagagccaggctcagtgaatggagaagaaaacgccggcctgaagacaaaagcttgctgctaaagtcagaagccctgccaacattttacaacctggatgcattaatgggctggttatctggcaggaataggaagctggttttgaaaacaatgaattctttttaggtacaaggtcagcgcctgacagaccttgaggctgagccaccccgcccttgtcctcatgggagaacagaccccctgagctgggacaccagctttctgtaagaggaaaggccactctgtcatccacaacacaggagacctgtgttgagtgcaccacacccaggttccaataaggtttatgagggacttcccagagctgaggtaggacgggatatgggagagcccacacgtccctacttccaagcaacttctcagtgagaaagaaagaaaatggtgccagcaccctgtggaatgccaaagcttgggtgagttgctggatgtgtgactgagaaatggaaccttctatcccttcagtctcctcacctacagaagggaaagggtagccctgtctaccacaagggcctctgcaggattagctgaggtcacagcagggacacacttagcaccaagtgagaggatggccagcattagggcctttgcacagcattgcctctagctagaacattcccaacaaaggctgtcccgaccttctacaaggcctcttccttgctttgtttcatcccttgtgcttactgccaccccaatgccccatctttcttaaaatcatatttgtgatcagacggtaaagagggactgtttcatcttctgcttggtccctggaacctaggctcatgctttgtatagtgttggccctatagacattgagacttgaatgaacataccatggttatcttagtccattttctgctgacagagcacccaaggctgggtaatccatacataatagagatttgcttggctcatggttcaggaagctgtcaaacccaagagcatgagaaggcactgggcaggggcagagtacttcttcatgcctttattccattgtggaagttagaagggcaagaaggggtgagagctctgaacagaactaatcaactaccaaaaccactctcacagtagccaccctcatggtgctgtgagttccttcaaggaagcagagcctccagggcctattaccgcccagcacatgtgtgttggggcacacatttactcaagccacgcaacggtaacgatggaggtgacggtcatgtgtggaaagtcccagtgagccttctgaatttaacgtcttcaagtcagccattgtgtagttaactctgggttgaagcattctctgatggaggggaggaggaggctgagaaagacaccagaaagttagggactcctcaccaggccccagtagagatgatgcaagcaagaactggggctggggaggttcttctggttgagctgtgcaggaactccagccacgactcttacgtgagttgttgcccaggctcaagtgagattcccagagatgcacctgcctcagccacccatgcttttataagcaaccacaataagctcatcagttgcccaactgagcttgagtggaaatatatctgtgctctgtcagtgccctgtctatctttggtgagaggaaacaaactccctgggaaaagtcaggcaacatgtagcataagcatctcaggggcagaagcagaaccttctaagactatatagatgatattccccacagctacagtggagatctaacaaataaaaatgcaggacgctctagtcagattcaatttcagataaagaagaaaccttttgcttttttactcaaacaccttcaccttctgcaacgcatacagtgtgtgtgtgtgtgtgtgtgtgtgtgtatgtgtatgtatacatgtgcatgtatgtgtgtgtacacattcatgtgtgtatgtgtgtctgtatgggtacatattcacatatgtatacatgcatggggaggcaagagactgatggcaagtgtcctccttaatcactcaccacattgttttcttgaggcagagtctctcaatgaacccagcccttgctgagttagctagactaactggcctgcaagcccatggctcatcctctctgcattccctggtgctgagatgacagtcacaagccacattcaggttctttaatactgctgtgcaccattataggccaaggatggtgtacttagtatctaacattagcccttgtttatctgatgataaattttagttgaacagcctacattttatatggctgtatggtagcgtgtatgtagaagagttcctgtgtgaacaataatacgctaaatgggaagatcaggtccagtaaagcactgatcatgtttcgtgactgatactttggatggaggagactttatttgccaagtcttagagggtgaatgtacccacggtggctgctggctacccaggaaacacatcaaaatagaggacagagtaaaggtgagccagggtgagcctgagtctacatactctgacccagaaggcacgagattaaagaagtagacaacaaacaaataaaagaataaaatagccagggctacacagagaaaccctgtctccaaaaacaagaaaaagaaaatataaaccttcgccctgcatcatgggacagtcttggtggctgcttgctcatgtgtactacctcagccttaaacttcttgagaaggaacttttgtttcccttgtgtgtttggtttgtttgcaccaatggggaaagaaggccagagaaagttcaaaagtccagtggctcagtaaataagctcttcctccacaccatcctgcctctgcaattactggacctggaggtccacggggctccagaggtaagcacaacttgttccacgatgagtggtacatatctgtcatcccagcatcagggaagtagaggcaggtggatccctgggggtcactggcagccagccaagcccacttagtgagctccagactaatgacagtctcaaaaagaaaatggtgcatggtgtctgaggaataacacctggcattcactgttctttactctcagcatgcacacacacatgcatatgcacccacacacatgggtgtgcatgcgtgcatgcgcatgcacgcgcgcacgtgcgcgcgcacacacacacacacacacacacacacacacacacacacacaaaactgcatccctttgtttccttccatagcctagcccctttccccaactcccaccccaccttctgcagtaccagagtcccctctctctgtgtctctctgcctccttctctcttgcctatcctaccctccataccagagtactggggtaacagcaacacttaataagaaagcaccccctccccagagaaagcagcgggaaggccaggagtagggggggagggctggagaagacagcagctttcaagccactctgccgttcatccgtgttgaccatgcccttctctcctgcctagagagcactttgtcagctctacaaacaaaagattatgcaaatcatttaagcataaagaaaaatatcatcttaaccaaacacccccaatgtaagcacccccggatggaagatgaatggaagaacttgggcatcccaaggccatgtgcaccctgagaatgagactgacgctggcctttgccctcaccccctcacagtgagtaccacagaaccccgagaggcaagcatgcctggaagagatgcccccatttgctgcaaactcagaaagcaaacaagagccctcaaggctcattagacctctttagacagttcttcattgggaaaaattaaatcttcccaacagataagcatagccttgtgacaaatggagtcactagttacctttcaaccgagctcctttgctgacaaatgcactagttgaggctcctggggcaaggtaagcgtgtttgcttatcttgaattccccttggttgagagaagtggaacacgggggcccctgtgagggggaaggatgaaggagaggcctggggagggaattgggaaggacaatgccagaaggcaagacactccagctcctgaaggtcaccctcgtagaaggaagccaaattgtaattcctccctgcccatcatacccaggcctccattaaccttgagggtatctcaggccagccctgccggtcactatctatcctgacctccacacaggttcctggagggtgacaccagaatgcctccaaatggctcactgcctgcccctctgcatttctcaacaggttctgtcttttctggaaaccactccttttctgggaagggttggcagcaccagagactgaccctggcagaaaatgaccaggccaaagtgaggccctcaggggggacagagaagagaagagaagagaagagaagagaagagaagagaagagaagagaagagaagagaagagaagagaagagaagtagcctaggctgcccctggcagaatctccctgcctagaggggttacttgctaaacctgtaactaccatgcagtggccaccaggagaggtggccaacccacatggcgatatcttatgtaacatgaagtactcttggtgatgaaagttaatacaagaagcagaagaagaaaaaaataagtcatctcgttattaacatttgtgattttacttatgatgtctctatcattgaatactatgaagaaaaatgtaaaatgacccaatgttataggcgtaacagataatcaataaacactacaaatgaatatcttaacatgggagaaatgtcaacatcagggaattataaagtctgttatgaaaattaattgcacctgctttttccacgacttaagtgtgccagctaggacaatttgttatgattttctcattttaattctttttttatttttggatatgaggtcagatgtagcccaggctagccccaaactctctctgtgactggactgctgatcctcttgacctccccccttgaatacagggattacaggagtgatgggcgtggcaccatgccaggcttatgctgttgatcaaacccagggcttgcacatgccaggcaaatactctttcaactgagcccctgaaaaaaaggggtggattagtatgaaccaagatggggaaactaccagattgttaaggaatatagaaatcagagcaggtctggggacatgttaagtaggaaatccgtatccagcaccaaagtagtcatgtcaagtagagttgtctaggtgcagacaatagcccatgctgagatatgaatagaaaaaagttcttggaaggcaaaccacatctgaaaccatgaccctgcatgcacttatcttggccatcattgcttacaacaggatgggatcttagctaacggtgcccagccttccagagaatagctcttgaagaagggatgggggaaccacaaaggagggcgggataagcagctaggaggtaaagaagtgatcagtagaggagaactggtacgtgtgcacccggctgcctgaagaagatgtttgtgtggaatggtacaatcagccttgccaacactgacaggagacggcatacactggggattggatgctgggtttggaagtcggggaattccctgaatgaacaaggcaagggtgccgggtcaaaaggagcagagggcatcctctcacccggtttcagggtccttagagacccagaatcaattaccttcactaaacatgcttccttgttctctttagcttggctttccttggaagaagacccatctttaccctcagaaatactgatgttaaaatgagtgtcacacgtgatttttttttatttgtattcccgatgatcagaggaagattttttgttcacgtgaatacctccaacccaaacacaccatccaaagctttggtgaggtgacaatggttgttcatggctttgtgaacttacaaggtttgaagtcatgcctatctccaggaaagggtttgtctctatagtagagtgtcctgtgtgtggttgatacagtgtaagtcttcagagtaaacagagtgttcatgcccattaaactgcctgggcatcataacagacccagtgaactcagaaagtaaatcagctctaattgtcttcaatcacaagtggtgattcttctgttagctttttttggggggggaggggaagcaaggtgatgaagggttattgagattgaaccaggggccaggccaggccagcacaatcactgaacagttcccccagccccacattgacttgttccgtgaaaacaaaactaaagctttgttctaggctgttggctccccaacttcacacacagaccctgtttgtctcatctatttgtgttttccagttgattctacagaaaccagctcaaacctcaggatgactctttctgctctcttggcctcttccttaaataattcaccaagaaatccttcagtgtccttggttcaataaggtccagatcttgtgggatggagatgtgactcactcagcaaggccacacggaattccctcagtcctcagggttaacagatggcagaaggctttgataagaccaagttccagatcctgaaggaaatgccaatcacagacatgcctccttctatcgggaacagaaagagttgactctgggaagaacacagacagacagacagagtggcttcactttcatctggagttttgtcttttgggggtccccagaagcccacaggggaaaaaaaacatggataagaactcagagtctgcaaagtatcttttgaatcgtggcacttctctctctctccaaagctatgtgttgtctgagtgggttaggcagcttttccacacttctgaatggatgctacaatatcctcaggagtctttgcccttactgttctagagggttctattttcacaaagtgcatgccttctcaaaggtccgtgccagtgtgtgtgtgtgtggcttcaaagggtctgagagctgccttggccttgactgctcccaatctacaaactccacatagatttctcagaatgtagggcatgttccttcatccaacactcattgagcaaccatgtcctaggcatcactcaaggtcccagcaagagcagccataaataagagagatgaaaggtcattttctcacggggcttatgcttcagtggggcaaactaaaacaaatgaacaaaataagcatgtgggatattctgtaagcagtggtggtaagctatgtagagaaaaatcagtcctgaaggtaggagtgcccagtgttcacagtaggtggaagggagaatgtatttttagccaagagctagagcaagaactcacagggaaggtattgtctgaagcaagaccagagagcagggagggtgtggactgacagtgatctacaagaggaggcctgtagaaggaagagagtgtaagagtggacatcctgggtctggctgttcctggagtgcttgagggcagttagcagaaaacagatagtagggacccaactcatgacccctgaaaagatgtgagctttcatccagagagatgggtcccttgggcaaccaaaggtcatgctctaacttgtatttcagtactgccccttaattgctacttgggtttggataccaaaggttttgagtttgtgcccaaaggtcctcatgctagaggcaggatccttgaggtgtagtcagcccttcaagtgctgaggtccagcacaaggaacttggaccactgagggtactgcccacagaaaggattagtgctagtctcgtggggtgagttagttctcatggaactgggttagtatatagcaaggccacttctgatgcacgagctcctcctgtgtctgctcacatgctgtaacacagccaagaggacagagaggaaactactcagcctgggacttccagcttccaaaatgacgagaaagggaaacatgtactttgcaaatacttagtttctgttaaatcactggggggaaacagactaatgcaactgctgtgtgcccaaacaagtgatatacgaacaagatgggggaagaggcaacacttaggagaccactgagataatctaagtagaccacacatcaaaactacctggagtgcctctcaaaactactaagccagaatatggggtgtagaggatttcccaggactggtacccccaggtctgactcatacacagtaaattatagttgacattcttctatggtatactagctttgaactcatggcctctccactccaagtccaccctttcacagccattcttcaaatagtggatctgggccctttaaatagctttcctttgccaatttggtactacattaagtggacagtcccagagacacagtggagtgggaaggaagttccagctgggttctggttctgcagcttcaacctacagaccgtctttaaagcaatcagcgccttccacatatgctctggcacaaggcgtcctgcagcgtctagattcataagaacaggtggtttctctaagacaggctccagcagtgcacatgaccagcaacactctgactcctctcccacccagtgggctgtagccattttctcatcagcatgttctcggtatattcaccaatgacagaccaaagaaacaattccacacaactctagcttagtgaacaatcgtgactcgtggggtggctgaatcactgaacaacccaccccagcatggacaacaactttgagggttccccaaaactgtactcctggagctgcctgcataacttgcagacagctgggctagttggagaatgtcctcttgaccagcaaatgggggcagggcttgtgagtctttaagtttcaggatcttgctaaaccttatgagttgtgttcccaagccttaagagaatgtttccattaggagaaaacatcaagacaacacttctgtccttcagggattcagaacccatgcatgagtgtgaaggtcagaggtcatcaggtatctatcaatccttcttttttttttttttaaatcactttactgtaatgaactcacaaataaaaaacatcacatagctagattaaggaagctactcaataatatgcccagccccaaactccatccatcccagtgaccacttaaaacaaagcagcactctctttccgccatctgttcagtcccttcgttttaagaaaaggacacagactgacaaagaagtcctgagcagtcctttctgagacactgccttagttgccgtgattaaaacaaaacaacacaatttctgcaagatggaggatgcaggccatcacaccagggaaggtgtggcagcaggagcaaggggctggctggtcacttggcatccagtcaggaagtaaagaatggattcaagtgtatgagcctttagggaacattccacattcaaaccagcacagccctagaccaggacccaacgcagctgccagcctgccaggttcaaaacccatctccacccactaagagcagtgtgacaccaggcatggtcctttaacttctgccagcccaacttccttttctctagaaaggaaataatacgcttgggagaaccagggtgaggaccaaagatggcggtgacagagagcacttccttggggtcagcagaagacagaagacactcattgtagtgagtcttttttttttttttttttttttttttttttttttttttttgctttttgagacagggtttctctgtgtagctttggagcctgtcctggaacttgtgctgtagaccaggctggcctcgaactcacagtcatgagtatttataaccagctcttcatcagattttacactgaccttagcccatccaggcaggaaggagaggagggacaagctggctttgcacactggtgactgcatgtggcttcagtagtaccagcagaaacaatgctgggacaccaggccacttcttagcagagctcttcttctgtttacaagcaaggacccagaaaaatcgccttgcctttcaaggctctctctcttcatgagtttcaaccacaagatcaaagttgcatgaagactgagcgactgccccacccaccccacccaccccaccccagatccccagcgattctaaggtccccactcacctggcttccctattgaccctccttgtgcagccagagattgctcaaagggagataatgtcatttgttgacatttcccagtgacaacaaagccagaccttcttttagggagcaagtctttgcatataattagcaggtcacatttccctcaggggactgaggcctggcattcctccttgccaaaaggagccagagccttcaggaacagctgaacctgggaaatgactttgctcaaggatctcaaaaaggcagtgaatgaagagggaactgagggctcagaccctttgtctcctttttcttaggctttcagtcccagagaggtctattctggacatgagaggctgagggggtatgtgcatgtgtgtgtaaacctgtatgtgtatattcgtgtgtgtgtgtgtgtgtgtgtgtgtgtgtgtatacttgtgtgtgtatgcatgtatgtgtgtatatacttgtgtgtttgtgtgtacccatatgcatgtgtgtatacctgtatgtgtatacttgtgtgtgtgtgtgtgcatatatgtgtgtatacttgtgtgtttgtgtgtacccatatgcatgtgtgtatacctgtatgtgtatacttgtgtgtgtatgcatatatgtgtgtgtatacttgtgtgtttgtgtgtacccatatgcatgtgtgtatacctgtatgtgtatattcgtgtgtgtgtgtgtgtgtgtgtgtgtgtgtgtgtgtacacctctgtgtatgtttcagaatgtacactggaggagggggtatgtgcctgtgtgtgtgtgtgaagaagaacctcaggccattcctccttgggtactgtctaccttgttttttggaagcaaggtctctccttaggacctgagctcacctactaggcaaagctaggctagctggccagtgagccacacagcttcatctgcctccacctccacagagctgtaattataggcttggctaccacacacttcttccatgagtcctaaggatccaactcaaccgtattccctaggcgccatctccccagcctctatttctgctttcatttaacaagtgtctatcattaggcatcacacaaccagtaaaactagtctaaaaatgacctcaaattccaagaagtttacccttctattttggaagaaaaacaaacttacatcatagagacagcaatataatataatgtgtgtaacatatattagttattgctatatgattatatctgtgtaattattcatgtaaaataagatggttaattaaaagaatgaaggatgtggtacactgggcacttggggagttaagaggcgtaaaataacacgaagctggagtaacaggtgaaggcaccaggcaagggctgggctttgaagcatcagctgaatttaaatgagatggaagacagctctaagggacagtgaggaaaacagctgggaagacagacctgggaaggaaaatgaagagctttggaagtgatcacaaggaatgtaggagggtgatgtcaggagttcataagagacggaggggaccagagggagaggcaggttgcaccctagtttttcagtaggccattcgccacccactgggccacataccacgctaggccttagtgattgagctgtttccaaagtccatgagcgtggaagatgactcccaatcagacctcaataccagccttccggaactaggtcctacatttcactctaagtagatttccactgacagaattgcaacagcctacacttgaccttcctctgcaagtctagacccacaaagacttgcccaacaagggcatgatccatacagatttgaccttggagcacagactccataataacaaagccagaagaataaacacgcaaagtagaaggaacactagaggttggctgagaaaagaatgagtcggggttagggaaatggcctgatcactaagcccagcaagcacaaagaccagagttcaattcccaggacccacctgaaactccagaaacagcagtgtgtgactggtgtctcagtgctggggagacacagacaagaggcccctggggcttgctggatagctagggtagctgactgatgaataacaaggtcagcaagagaactcatctaaaagggcaaagaacaattgaaaaagacactggacatcacacacacacacacacacacacacacacacacacacacacacactgcacagaatggggcaccctgtttgggagcatttaataaatgtgatctcattgtctttgcacctgaccctgggcttctgaggaacacacacatgctgataggtctatgagccatgagtacacatgagcaaggcatcctcctccataaaccaaaggcatgctagcctgatgatgtttaattcaccagtggtatttggcctcacttattagatggagggattactctggctttgtaaaataaataatcagtcacagagactggtcttaattgccttctgccctttgcacatcttttttgggcctcttgtttgaaattttgtttgtaattttcagactgttctttccttcctaaggattctttctcaagagtctagtgagattcaaaaaaaaacaaaaacaaaaacaaaaaaaaacagaaaaaaaaaaacaagatttttttaaaagggggatcacacttgacagcaaatttagttgcctttagcttttggaaatttcccaattagctcatctaattctctgacaaattctggtgtctttttgtagtgaccaaacagcaacaacaacagaagtcctgttcgagtgtgaagagcaagaatccacttcatgaatgtatctgtgtgtctcgtctaaagaacaccatcccctgagcctttggtgcttggcctaaaagtagattgattccttagcccctgcttgagactttaaaaacagctggtatctaccccaggcttccttcttggtgggctctctctccctctgccagggaccaaaagtagatgagctgctgacatctgctggttactcagcagagcttcggctcttggaaggacttcctgaggattccagggagctccacttgattcctggaggattcccccagccaatccagaggcaatgcaaaaaaaacgcaaaccaagaaaccatgggacaccttcccacagctctgagaagtgtggggcaacagtagagaagcagccttccctgaaggaagggttacaacactcccagggtctggatggattagatttgatctcaaccatagtggtgactcctgaaacaccaggccttctggtggcaggtgatgctttctctgcagtggaaacatttgactctgtccgatggttctttaccacaaatatttttcacaagctctccatttgctgggcatcataaagtggaaaatgctttgttgagccctccagagacatttttttctcttgtcacatgatgtccaaccagaagttaatgtgaacccatgagactctaaacctttgttcgtggaaattcttaaagtctacctttggaggaagacttgggctccttactgaagatgagacaaagcatcccccagggagcctcacagcctgaaggcagacagctgacattggggtattagagacactttctaaagtttgcaaacccagtggaaatcggtcattattgtaaaacgctatctgatttctttatagcaatgaccacccaaaaatgcagttggttgcttatttgtcctcttgagttttgccaatttactccccttaaatgtatatccttcctcccaaatagagagcaaaggccatgccagcctctgtaccaggctgttcccagtcgctaaaactctgctacctggtaaaggtctacagactttgtttaacagagtgccagcatcttcttcctatagaccacaggagagcccggggaggaacacaagagtgttttgctccccagccccatggaagctccatgatggctttacctggatagcccaaaggggtgacatgcagagccagctacctccagtagttcctggaggtcagctggtgtgagcaggggtgaatgccttccaactgttcccaggctggcctctcatgagcaaggctggtgcttgattgctgcctgggtatatgtgagtcttcagggactgctgaaatatgctgggaaattttccctctgtctctagctaaatggtttcctgaggaaatgaggaatgggaggtgggaaggaatgaaaaattccagtaaggaataaaaataaaaaacaaaaaaacaacttttgtctctggaactggggttgttggcatcagacctgaaacactaggatcaccaaggaatagaaataaagaactttttttttaatcaaaaaagaaataaatggaaaaggaaagtctatggtctctaatattgcataatgaatgcttaaaatacttcaatgtctgaagccgcttcacagtgttaaagggaaggtttagggacaactggcacatggggttcagagcctaaggtgcctgaatctggactcagcccaggagggcagttactttctggcatccattaatgtagtttatggttaaattgctggaccccatgtggactgaatgggcctctttatctttgaacaaacagagggggaaggagggtcccccactcctggccctgtctgtatttgtagaccatgctgtgggtttttccattccagctgtcaatcttcccttgttgtggtctggggaagaaagaaaagttcaggaggagtgagtggagagtcaactccacgctcctcagtcacagaccttgggtaagtacagtggtcagactttccttgaagaatgaggaaatcgggggccacggggactctgcatccccactctcacccatcataagaggtgtacccgacttcgtctggctccccacgcagggcacacgcttgtgactacacgcagtgtccctcatccaaagccccataggacacaactgagtttccagcctcaaatgccatcagcagtgacaggcacagctggagcagaaagccttcgcaaatgtctccggcacacagcagcacaaacgatcaatgacattgatcggtttgattttgaaggtgcctctgtgcccttaaaggaagactagatctttaaacactaacgcaaaacaaaacagaccatgcaagctacgcaaaggcttacattttatggaaaataaactttctatgatctagttagagttacaaaagactcctttaaagaaattacctgaaaatgtcacagccacaactctgttgtgttgactgttagaaaagctcccaaacagccttctcgggaggcccggatcacatctaggatgagggtatttcttgctttgatttttgttttgctcagggtgtcttatgatgaaaagcaaaagcttttgtggcagacagcactgagttagaatcccacatccattatccattaataagtgaccttgagcagatagtgaactttctccatgccttacttttctcatctacgacctggggacaaaaattaggtagcacacagagtttctatgaaggtaaaattaagcttaacagagtgcccaccatacagccatctctcttgagtggctgcagtcggtatcaaggacagaaaaacaatagcgtctcctggggcagctacaggcaatgtgcagctctaagctggttgcttctcttattcctttctactggagagagggactgagagataggtcagtagttgaaaagcttgtcttgcaagcatcaggacctgagttcagattcccagcacctagataaaaagctgagtgcagaggtgtgcacttgcaatgccggcattggccggtagaggcgggatccctgaggctgacaggccggctggctcagctgaagcagtgacctccagtttcagggagagaccctgtctcaagatggatccagataaaggaaggctcagagtcagtctctggtctctacacatgtacacacatgcacacacatgcatacaggaacatataaacacaaataaaccatacacacacagagagtttaagaatcccatgtggtgagttctacttttgcctcatcttagacttaaggaaactgaggcacgatgagctgtcacacagtagtcagcggtggaccctgaccacctggtgcacaggtctccttgagtaacaaagtccagttattactctacatagctcagcttccatttctgtctagaaaacctgagggaaggatttcaccactgttgacactagacgtcaacatccaacgtcaactggactctgcctccttggaaagactccaggcccagtccggatagtggacctctatgaaagcttacctttgacctcatctcccagctgaaaacaaaacagggattgttacataaaccagtgctggctgattcctgacaccctaaggtgcttctggagccacaggacaaacaccagcattgactaaaagagcggacagagagcaggcagctacttttggccctcaaggcccagtcattattggaccagtttggctcagctgccaggatatcagttggtgtgactataccagtgtcatggggacatatccaaagccctccaggggtgccttctgagttaaccctgcacttgtcactcactgtggtcctaactgttcagtcacagatgtgttggggaatcttgtattcatttatttttcaacactttctcatcaggacattcacccatactgcagctcttagtgactgcacacgtttttggattttttttcccttcttaaaagtcagaaattctcaggggctagagagatggctcagaggttaagaatactagctggtcttccaaaggccctgagttcaattcccagcacctacatgttggctcacaaccatccattgtgaggcctggcaccttcttctggcctgcagggacacatgcagacagaatactgtatacataataaataaataaataaataaataaataaataaatctttttttaaaaaatagtcagaaattctcagctttagagcatacttcagcttcacttcagcatgtgtgagttgccgtcagtcctatcctgtgctcagggtaacctgaaaagggacaatagtaccatgacagccaagctaagcactacagaaccacctagcatttaacaggagggtagagtacacattgaggaaacgctgggcagaggcgaggtcatgtctcagcaaacagagcaacaagagacttcatcttgtgactcagagcagctgaatttaaaagatgaattgtctgcatctggaattttccattcagtagttctggattgcttttgaccacatgcatgggaaattgtagaaaacctaaccacagataaggggagactgttctccggccaagtggggttcctgacatggcgggcttattagcaagtagccatagtctacagctactctggttattatttatctactttgctgctttaataacacagttgttggtcagtgctgaattaaacgcttagagtttatgacccagtactggggacacggatcagttgacacagaacttgtccagcgtgaatgaagctctgggctccatacctgctgacacatgaactgggcatatgcttggaataccaacgggaggtagaggcaaggggaatcagaagttcaaagttattcttggctactttgcaagttcaaggccagccaaggctacatgagattctggggttgttttgttttgtttaattaagggccatattttaaaatgtcactaaattgctaattcatgcgtcactaatataaatcacaaactcaagtctaaataaaggcctaccactaaactgtttatagtttcacttcaacacatgtaaacttcgaacaatgagcgacccatctttacaggtttctcagagatgataaagatgaaggtggggtggtattggtgatggtgatgatggtgatggtggtgatggtgatggtgatgatggtgatggtgatgatggtgatggtgatggtggtgatggtgatgatggtgatggtgatggtgatgatggtgatgatggtgatggtgatggtgatgatggtggtgatggtgatggtgatggtgatggtggtgatggtgatgatggtgatggtgatggtgatgatggtgatggtgatggtggtgatggtggtgatggtgatggtgatggtggtgatggtgatggtggtgatggtggtgatggtggtgatggtggtgatggtggtgatggtggtgatgatggtgatgatgatgatggtgatggtgatggtggtgatgatgatggtgatgatgatgatggtgatggtggtggtgatggtggtgatggtggtgatggtgatggtggtgatggtgttggtgatggtgatggtggtgatggtggtgatggtggtgatggtggtggtgatggtgatggtggtgatgggtgatggtggtgatgtggtgatggtggtggtgatggtggtgatggtggtgatggtgatggtgatgggtgatggtgatgatggtggtgatggtggtgatggtggtgatggtggtgatggtgatggtggtgatggtgatgatgatggtggtgatggtggtgatgatgatggtggtgatggtggtgatggtgatggtgatggtggtgatggtggtgatgatgatggtggtgatggtggtgatggtgatgatggtgatggtgatgatgatgatggtgatgatggtggtgatggtggtgatggtggtgatggtggtggtgatggtggtgatgatggtgatggctgtggttgtggtagtgatggtgatgatagaaacagaagttgctctttattgcattttccatatgccagccactataattctttgagttaaggcacaatgtcctctggaaagcctggacatgacatttcttcccatctccctatccattatgctctcttgaacaaagaacactgtgacacatttgcaaacactagccacatcttccatcctatagggccttcacagtatgtgttcttaacttttctcccatgaagaggaggctaaatttttgtttctacttgaatccaggcttcaccatgatgacagaggtgatactgtgtcttccaaggctacatgaaaaaatgcatagcacctcctaccttgttctccttactcagacacaggagtcagaagaaacccagagagctgtatagggactgcagcccacaccacagcagaaccaacctcagttcagacaaggaatcaacagcgtctcccagtgatgccagcccagccctggtatcactgacaacctccaagccttgctccggagccctatcctgtgaggcattgccctactggcacctgttgaggtccccgtgtttgtggtggttggaacaaaattcagacaatgctcccctctcatgtagagcttaagcaagggctactcttgggactcatgttctaacagttgtggggcctgcagtcagaatgcagacaaggaccagtgaaccagctatctgaacatttgaaagctatccaccatgctaacaatgtagtgctcaatcccctcacaccctcactgcactgattctccttaagaacaactctgagatggtctaacttaaaaccccccagactcctgagttctgtactaggtagaacatgggagttgcaagagctggccatcagcctgctttccccttccctctccttctctacccctcctctcaacattgcaactcaactgccatatgcctagctctctctgagactcaatatgcccaccctctggctgtgtctcagtcctgaagacctacacacctgtatcaggatttgacctcaaggcaatgcacaaatttaccggtacacctggcctctgcacaggctcagggcattcagatgggcggttgctaactatggtccccataaggacattactaactatggtccccataaggaaggccatggccagatcacaaggtctgggggagggtccttcttatctttgtataaatgtattattgcccttgggcttgtcttgctcattcctcagatatgacggtattgtgaaagacacagccaacctgggaccttcctatacagacatgagatgaggaaagagagcaccttccccacccccacccatcccaggttcaggaagcaggatgagggacattgctgtgtcgtctccagtgtctcttggctctccctggaaccttcctgtttttaacagagcctgtacttcctgctgccttctccagtccccctctccatcaatcaagctgggacgtctttcctggaccccactccctgacttgtctgtgttgccaactattggaagtcaagaaaggggagatccctgggggctgacttgcacctgaacctctgtatcaagcctaccccagggatgcatgcacatagagcttccatccttagcttttctcagtcctgcattgcagagtcccagagaaacaggcaaactggctgattgtgccaggaattaccacactgggagtggaaaagaattaaaatcaggattgggactgtgtttaactgtttggctatacactgccatacacacatattctaagatgcagagacattaaggtgatgaaaagactatgaatttgcaaaatagaacacaacaacaaaaaacaatcaggagagaaatggaaatagatctgtggacaagggcagggccagaggcagaagaccagagtctccgacgcaggctgtccctcaacagtccagagtacacagggaaatgaaagccctggtctattcttttgctgggagaatacaacaaaacctaaagctgaaacctggctcagtgtcccccttcctgtcaccactcccatcactaccatactgcctgctaaagcaaatgacaaatgaacttgtatctgcatagcaaggtacagcaggtgagcatcaagtgagcgatgtggctagaagctcagctgtcttctattactaagttgttcacgacactgcacaacaacttagggttaaaatacattaaattagaagagaatggatacattaatgaaatgatattgatggaagaatgtgtttccagctagcaaaaggatgcctttgttatgtttacatgagtgtccatgttttaagtggacaaacatgtttgccaaggtgcctgaggagctaccaggccctgtgttataaaatttgtgtgaaaaaaaaaaaagtgggtgagaagacaggagacttgttactgttgaaatttaggcactctgaaggtgccaggtgtgtgcagcccttaacagaaacccaagcagcctacctcactgaaatgagcacgtgagcgctgtagaacaacggctggtggccctccatgctagctctgggcattataactgcattttaaactcagcttccccctgcattctctttttattgcttgtaataccaaggattgaacctaaggtcttgcacataataagtaagcatgtttcctctaacatctttacctacccttcttttacgtttttactttgagtcagggtctccctaggtgaccttgaacttgttctgcggcccaatcaatctcgagcttttgatcatcctcctgcctcagtccacacaggtacttttcatcttcctttgtatccttaggtactacagaaggcctttgggttataaaaccactacctcacattctctaacactgtgttactcaaactatggccctccagcaagcccacagctgccagacatacaaacaccacactcaacaccatccaccccgccagaaggtcccagtgggatctgtgtgcactttcagatttgggcaacagaactttcagacacagctctgtgtacacatgctcacggggaaagctttccgctaactccacaatcaaactcaattactgtgagctgatcatcaatttatcccattactcatgccatgtaaatttctcttccttgacctgactgccctgtgtcagctttgcttctccagctcctccaaacaaagtgtgggtatgggatgttaagtagaagtcatctcaagactatactttctagcaagctgggtcaaaagctccgtgacgaaggagacacaaagcagatgctgaaaagaaccattggattgtctgagcacagcccagatgtcagctgcagtttgcactgtcacacgagatcttgattcaactagctcaagctgactctgcgatgtccaatgggacacgggctgtgccccgcaagtccccaggggtgtgtgccccatggccagtgctgcttttcaccagggttccctgctgtgggctcctcacaagctaagccccagagctgtggcttccctttgatttctgcttcccccacagctctccgaggccatcattggaggctagcggggacaggagggttgctctccagcgatatcaaaggctctcaggcatttcagttcagattgctcttcctggtgctcctgcccctccctcatctctcctcttctttagcgcgaagcttctgcctgacttctcctatatgacctgttggcagttttcttgggttgtcccctcatgtctcaacccatagccctcaagcctcaattattttcctgaacaaagttcctttcctatagttgtttccattttgattctgtggacccactaagggaggaacacatccagggcccttagggtgttgtagcaaatttggactttgcccttgtgatctgaatgtctgggggggagaggggcatgattagcaccattgtcaacttgactgggttaagaatcacctcagagaaaaatcttgtggactctccctcctgattgctgtagggggcatatgaggtggggtcggctctcccgctctcaagcccactgggttgtttcacctgtactcctgacaacagggtcagctctagtgaagcacagcaactcttctaaaggcaaacatttaattggggtagcttacacttcagaggtttggtccactgccgtcacagcagggaaggtgggatgaaggcagacgtggtgctggagaaagagatgagaattctccatcctgatgcacaagcaacaggaagtgaactgtgtccatgcggagcatagcttggtcgtagaggacctcaaagcccaccctcaaatgacacacttcctctaacaaggccacacacacctcctaatagtgctactctctctgggcttatggcaccaattctattcaaactagcacatttcactccctggcccccataagcttataaaagtatcataatacaaaatacatccaacttcaaaggtccccatagtgtttcatagtctcaaaatgttttaaagtccaaagttcaaagtctcttcggagattcatgcaatctgttaactatagtcccctataaaatcaagataaaaagcagaccgaatacttctaacatacaatggcacaggatatacattgccattccaaaatacagggaagggagcagagtgggagatacggaccaaagtgggaccaaaaaccagccgggcaaactccaatctctgcatctccatgtctgatgtcaaaatgcttcccactccctgttagcagctctccttggaagggatcccatggctctggcatctccgttatcttggagtctcccaggcaatccagggtccaccttcacagtttcatgcaatggtctctctaggcctccattcgtgacacccctgacacaagcctggcctcagtagctgtctctggttttggaagaagattccatcgcccctttcttttgtccttgagtcacttcctgttgcttgtgcatcaggatggagaattctcttgctgggactggaacatggacccctcgttcaattacatcttcaccagtttcctgtttttgacagactccctcactgcctaagcttggctgttctggaacttgctctgtagatagatcacactggcctcaaattcacagatgcaccagcctctcccttcccagtactgcaattaaaggtgtgtgccaccacacccagacctaagcttttctttaattcctttttaccagttggaaacataggtgggtgggatcttgccctgaggtcaccactcccttattccatctcttaatcaatttatctccttgaacataggatttagttctgttccactgcctggtgctccttttctcctcaaattacaattttttatttttactttctcagcttgtttcttttagttataaatgttcattagagttaatactaataatacacaacagagtctatactaagctgttttgagatttcctctgcgaatggaattaatccagatctcttctttagactcaggcagactctttggacaagggcaaaaagcagccacattcttcaccaaaatatcgaaagaatgatctctagacaacatactaaaattcttctcctctgaaacctataaaccaggtctccagagttgaagtcagtctcagcaccactgtcttccatgctcctactaggatggcccattaagcagtgcttaaagcattctactgctttcctaacccaaactcccaaagtccaaattcctccaaacaaaagcatgttcaggcctgccacagcaatatcccactgctggtaccaacgtctatcttagtttgggtttctattgctgtgaagagacaccacgaccaagccaactcttctaaaggaaaatattacattgtccattttgtccattgtcatcatggtggggcaggtggcatgcaggcagacacagtactggagaaagagaggagagttcttcattttgatccacaggccacaggaagggaatgttgtctacaatgagcatagtttggacataggagacctcaaagcccacccccacaatgtcacacttcctctaacaaggccatacctactcccacaaagccacatctcctaatagtactactccctatcagctcatgggggccaattacattcaaactgccacaaccagtcatgacatgctcctgatgccatgcggtccctgctgagatgaactgtgtcccctcaaactgtgaaccagaatgaaatcctccatccttatgctgcaactgtcaggggtttggtcacagaactaacccactgggttaactggttaagaggtattgggaaggtagctaagtccagaagtaagtactcagactcaaaggaaaaagaaaaaaaaaatacatatatatatatatatatatatatatatagagagagagagagagagagagagagaatctacctatttcctaagttgaatggattctctctgtctcctctattaagacaatgagtacacaaagttcaatctatctattttcttcatggtcaccatcctatcttttgccctacagctgtgtaagccaacatagttgaatagtcatgggggggggtgtattttatccttgttaaaagatctagccaaatccagtctatcaaaaagacaactacaataattgactgcttggaagtatttctgcttcttgattttctaggtagatttcatgcagtttatatgagaaacatctaacgccatacctggtacactgcaagccctccatagtattgtttgccttgacaataaccacatccgctatgcctgtcatcttccttgtgctaatgattatgcaaagaggctgccacttccattcttccaagacacttctcacttacccttaaaggtttaaaaactactagctaggtgtggtggttcacacctgtagtcccaggacttgggatgctgaggcaagaagactactgcagttttggaccagcccaggctatagagtaagacacctgcctcccaaaaaaaaaaaaaaaaaaaaaaaaaaaaaaaaaaaaaaaagataaaaattactttcctggaaaaaaaaaaaaaaacttgcttagcaagccattatgcttgtctttaaaaccttcaggaaaagagggagtattcaaagacagctacagactccagggaagtggggggggcaggggagttggggatagagggaaacagggggatggtggagcagggaggggggggacaagagggagcaagaggaagcagaggggaacaggatcagagggcatggagcaggcatttcctcgtggccttcacatctgtcagcctgccttggtcctccaggtgaggcgaggctgagcatctgaagcagggtggggaaagggggggcatccatgtcaagttaggccctgcccaaagggagaaaagagggagacatgtataccttcacctttcctcaggtctttgtagctggggcttccgtgatctggactggggatttctgaagcataggcaatcccacatgctctaatgccacatggtttctaatgcccagccgagggcagacataggacaccccacaaatggacacgttcatacccatttgcagagctggggtgtgtgggctgcagcaatcaggtgaggaagggagcactggtgacaagattcgtccacagaggtgtgggtggggttggggccgtctcctcataaacgctcgcctgggtgatcttagaatctggtaacggcacacactcttcatcatgcccttcagtggagctgagtgcagacagcttccccccacttaacaataggagatgtggaaaagaaaaggcaagcttgtggcctcgggggttttgtttttttcttttttttttttttaacctcagctctttctgctccaacctacatctaaggggaagggaaaccgtcctttgttgtctctcagtctcccttaaatttaagaacagctggggatatttttcatgattcattaaattcacatcattccaaagaaatcttcctgccgatttatctttgcctcagcagttggggctcccagactgagtgctgccagcctgggtccgctgttcggggctgagtctgtgatctctcctgctgcaatatcctttttgagggtgaaagggaaggggaaaagaattggggtattgaaatgaatctctccagtccatgcttccctttctggagataaagagaaagttgtgtggctgtcacagctaaagactaaaccccagctaatgtccacagtgggggagaataattagtaaagtctctaattagaatctggtttacatttctcttttcttagaggctaatccttgtgtttaaagaagatagtctgccttgattaaaacccctggcttaaaacagagccatgggggacccacatggtgggtgcaagtgggttcctcaagcattcatttgtgcaatcattcattcactaaaagacaacaacatgctgggtatggccacagccctaagacaaacatgatctccaccccaaggactcatgaccatccttcacaccaactgtcatctctcaggggatggaacatccaaggtcacttcctagttcaagagcccagagtttgcctgggttactgatacctattgtggaggtaggggacccaatattttatatattaagtttaaaaattaattttaaaatgttttaaaattactatgtcaggcgtggtggtgcacacctttaattccagcacatgggagacagagtcaggtggatctctaagtttgaggccagcccagtctacaaagagttccaggacagccagagctacacagagaaaccttctctctctctctctctctctctctctctctctctctctctctctctctcttcttgaagaatttcaatagattgaatgcactcaatgatagatggaaggtttcaataccaaagagagactgaaggaaagagggagtgcaggagaggggagggtgtagctggggtgttaaaccacagttaaaggacagttaattacatataatgagggggatgtccttctgaatgctgggaatatatgtttctcttattggttgatgaataaagctgtttcggccaatagacaggcaggaagtataggcggggctaccagactaggagaatgctgggaagggaatgacagagagtctccggaaagatgccatgtagctgacgaaggagtaacataccagggcactacaggtaagctatagccttgtggcaatacatagtttaaaagaaataggttaataattaagagagagctagtcaataagaagcctgagccactggccaaacaatttgtgattaatataagcctctgtgtgtttatttgggactaaacggctgcaggacctggcggtaaacaaacttcattccacaaatggtgctcaatgtaaggcccaaacccatgaccctgagattaagggtcacatgctctactgactaagctacctgggctttttctaaattattatggcatttttttttaacaaaatgtagacagctttaagcacgggtctcatgtccacaaagccagtctagcagaggctctctccaccatcttgtgtccagaaaggtctgtccctgtcacataacaccacatctcctcaagaatcaagttatttttaaatataatcacctggattgacaaacttaagaaatgaatcactcacggtagaatgttcagttgctagggtgtagttcatcatgacggggctaaaagaaccaagccaacctttcttcacacatcatctcttctttagtacacaggggatatgatatgtaccacacacatgtgtgtgcatttcctgaatcgagcttgtttttcctaaactcattctctctgtcagtaaggtagacattatagcattagtatgagtagtgcaagatgccctggagtgccacgttagcagagattagaaatctaccaaaatagtctaagtgtggaactgaaacatgggctccagacacgcagacactgcatctccaaaagagagattccatacattgtcaactccaggtgagttcagagcctgcctgagttagctgttctcagtcctattgagccctttagggttgctttgggaagcttctagacattgtgaggcctgaggtccccagcggccgatgctgaatttgtaggcatgttgctgggacggggtggttgtgtggccagggagcacagttctaggtgactgtcacatcggacactagctcacacaccctgaagcacagaggagtacacaccgcgggtggatctgagagtcacagcccgctcgagagcttattaatttaaatccatgctggagaagagcttgcttgcatcagcctcattataatatctgaaatatttgaaagcaataaaatccctttacaaaagacagggatagagaggaagagagactcgtgtggcttaatcctggaagtcatcaataaaatacactattggttccaccccttctccaatcccagcctctgccgacaactgcctgaccccaatcacttccaatcacaggacacacgttctcccctccctgcagctcagctggtgagtaactgtttttactctggctgaaaaattaattccttttcaaaaatattctcatcttctttattggggggggggttgctactgagtgacaggattatgaagtgaccccagggtcagaaggagactttgctctttctcatgaaagaaatcaatgcctaagtccaactctcttaaaataatatattcttgtggcacacacgcagcttttttgatctgctatgaaaagaataagaagtaaagaggatcagaggtggtgatgggatgttataatctcccacactcacacatcagcccccactaagtaattcctgataaactgaggatttacatatttaagattaactggagacaaggtaaggcagatacttccagaaacacagtctcactcaacaagttaactcttacaacttcccgctactccacgccactgtttgcttgacttcccagcttaatactgttagtgagtaaccaaacactatctttcagatcaatcgaactcccaacccaccctaaacatatatatatatatggccctgtcctcagaaaatcccaacagccccgacaagcaacggttaactgcacaggacgacatgtaaagcagcagatggaacccggggaggcagctgggagtgtctccctgagaactgtttttaacagcctgcacacaaataacgcctctaccgtggagataaaaataaaatgtaaatattgagaaggttactggtcacagcagcaagatggcacaagatgctgttacagtccccgttctccaccacactggtggctctagatgctctcccacttggggtagttttaggagtttgactttactgggagctcagctgctctccaagccctgtccccaggctgctctcaaggggcaggcacctgagtgggtgatgtcaacagtcactgtttctctaacttcctgagacggactcgggatgcagtttggcagagcagggcctctcctgacttggattcgatccccagtgcactgggattcatcaccctacagaggcttcatgaatcctaccacgtcccctttgcgggaaagaaggcaccaggctgggagggggcgggagaggacagtaagtgatgatgacaggcaaactaccagatagaaatgtttaaaatgtcatcatgaatgtacagcattgtgtacaatgatatgcatgaattaaaattttacagcatcttgttatgtgtggcatatgcacgtgtgtgtggtgtgagtgcatatgacacacgtgtgtgtgatatatgtgcactgtgacatatgtgtgtggtatatatgtatatgaaatatgtgtgtagcgtgtgtgtatgtgtgtagtgtatgtatctggcatgtatgtggtgtatgtgtgtgtggcatatttatgtgaggtgtctgtgtgcagtatgtgtgtatgtggcacgtgtgtgcatgttacatatgtgtaaatgtgtgtgtggtatgtgtggcctatgtatgtgtatatgaatgtgtggtatatgtgcgcatgacatgtgtgtgtgtggtatatgtacgtggcatatgtgtggtatatgtccatgtgacatgtatgtggtgtatgtgtgtatggcatatgtatgtggtgtgttggggtgtgtgtgtagtgtatgcgcatgtgacatgtgtgtttggcatgttgacatgtatgtgtggtgtgttggtgtgttgtgtggtgtatgtgcgtgtggcatgtgtgtttggcaagtatgtggtatatgtgcacatgacatatgtatgtggtgtgttggggtgtgtgtggtgtgtgtgcatgtgacatgtgtgtttggcatgtgtgtggtatatgtgcacatgacttgtgtatgtgtggtgtgggggtgtgtgcgtggaaaacagagagagggttcaagtgttctccttgatcccttcctgcctttccctttgaggcggggtctctccctgagcctggagctcatgttttcaacaaggctgggagccagccaaccccagagcatctcctgtctctgccaagcatagtgctacttggggtacaggccttcctgagaacacacttaacttgtgatgtaaatgctggggctcgggcccaggtccctgtggctgcacagagggcactcttacccacggagcagtctctcaagtctcttaacaataacacttcaggtgtgggacatggctctcctatctatggagggacctctgatgaactctcggtgggggagtgaggtctgaatcctttgtcctatgatgactgtgaccctcgtcctgttcacacggaacaaccttgtcttctaatcatttatccttgaagtgaccgaccaatgcaatgagtccaaatccctgaagcaggtattgagagagggggtctcatatggtacacacacagcagggacttacacagaattacccacattttacatactgacacagatgctagctacttattgttctctttataatcatttattaagtagaagcacttttacaatcttgtggtagttttgaaaaaaaatacatacatacatacatacatacatacatacatacatacatacatatgcacaagaaaactcacctggcaagggagtgataccaggagtaaaaagtggttttcccaaggtgaggttcatccactgtactccaggtatgctgaccctgtcatttccccaaacacaggagatgaacctgcatggctcgtggtgctggtggctgcgttggtcctttccctaacgagaattcagaaaactgcaaaaaagactgagaaagggaaaatcaaattcagcaaataagtctccaattttgtgtgaagatgatacagaaaggggatcacatagacaatcacacagaaagggatcggggagccaggccataagataaatcattagagggactgaaaggtccactgggaccatcagaaacagcttcaaaggaaggaagtcattgaactgggtcttgaaggacagttaagaattaagagcagaaccacagctaataggcagtgggcacccactgggcatggggagaccccctcagacaagcagagatggtttacagtgtagacctgaccagacggggccaggatggaagatgagaatcaaaactgagagtttagagtttgtccaccaataaggacaagagcggagatcaggaaagtgttgtatggagggtggtgtgatgcttgctgcgggtgtgtgaggacctgagttcagatccccagcattcatgtaaatgccaaccaagtagccataacagcctgcctggaaggcaggcgcaggagcttcctagaggcaagctggctagctagactatccaaatcagtgagctgtgggtgctaacgagggaccccacctcaatacatacggtggcaaatgatcaaggaacacatccagcgttgacccctggcttgcacacacacacaaacacaaacacacacgcacacacccatgcacgcacgcacgcacgcacacaggccatgcacatgtgcaaaaaaaagaatgcatctagactaccagtgcatttagaattaaatttgcagctatccagtgagtgggtaaaaatggacagagcacagcgatatgaagaccatgaggtcatcatagattaaccttgacttcgagaacaccaaagtaggaaagagaggggtagctctctggaggctcttaggaactcagggacttgggtccatgttgccttggatccctccttcaccacaaagcctctctgcctttattgcaataaatgtctcatcaatccagccatttaactttacccagacaatcttcccatagtcgttcttttcagtgtggaagacaagcacctcccatttagaagagaaagtcttgcctactggcagttacaaatacaatcaccgcaaatgtgacaccaccacagtcatgggtgttcctctgcgtgtctgggcacatagcctgcgtgaacgtgctgttggtcttgagggagtgtagacacacccatctgtgtctccctctggttctatatacttctgtataaaagttctgtgtagtttccattcattcaagctgctgactatatctccttgggctctacctctgagtaaaaaagccacaatggcacaagcattggttttatctctcaggccccatcagcatatgttaaaaacatgagcacctcaagcctgtttgatgtgtttactcttttaaactacaaatgaattgaacattcagaaatgaatgagagaccaagaaaccatctctaatgattattacctaagtaagtacttcccatgaacctacaatcattgcatgttaaattacacacgcgcgcgcgcgcacacacacacacacacacacacacacacacacacacacacacacacacttccttgttcttctctggcggatcagccctccctgtatgactctgggtctgatgtgttggatggctgacacacagctttttgttactgctttgtggttagtatctttcctttaccaacaaggagagtttgaggatagacaaggttcaaacagactccgaaccaacaggaaacaatccttctccccatgctgcccaggtttgctcaagcaccccaccgatgggccatgttgatggccaagggaagcttagcaccactggctggctgggaaaacagtagtagataggcctattcagttctcatggttcaggtgccatagcaacaggccagagatacaggcacaatgaactcgggttcctctccttgccaggctcagagtacttcctgtccttcaacaaattagatgaaaagtcctctttaaatgtctgcagctggggctggagagacagctcatgggttaagagaactggttgctcttctagaggacctggttcaattcccagcacccacgtggaggcttacaaccatctgaaattccagttccagggcatcagacaccctcttttgaactggcacgagacacgtatatggtacacataatacatgcaggcagaacacccatacatataaaatttttagttttaatttgtctttgttttgttttgttttttcaagacagggtttctctgtagctttggagcctgtcctggaactcactttgtagaccaggctgtcctcaaaagcacagagatatgcctgtctctgtctcctcagtactgggattaaaggccaccactgtccagctaaattttaatttaaaaaataaacaccagcagatgacccagaattggctccaggacttggtaagatgttgggggctcttttacagagaactcagtgtgttgggtgggaaatgttccctgtgactggggagcctggatcttatctcctggtctacctcaatgagctaagccacaaacactgtgaactgaaccaagcttggctcagaatcctggtcaaccaaaacagttacattttggtagagaagtgagaaatatgagaatatattgaatttttcactcaatttaattattgcatcaaatgtactagccgttaatatgtctacttctctgataaataaatttaaaaaagtcaaggactagctcagttgttggcttctctcagaaggtatgctgattccattagctcatcccaaggtgtttttgaaaacatgttaaaaacaaacaaataaataaataaataaataaataaataaataaataaataaatgttggggccagaaacatggcttagtgggtaccagcacctgtcactctttctgagtttggttccaagtacccttgtctcactacaattgtaactgtagatccatatctggcaccctcttctggcctccagaggtactgcactcatgtgcaggtacaggcaccataggtaaataatacacataagtaataaaaatcatgaaaattgtttatgtatgtgtgcatgcaagtgtgggaaagcacatggaggtcagagggcaactttggggagttagttctcaccttctgcctgttgagtcagggaccctcttgttcttgctgttgtattgctggctgaaatgctagtacttggggctagctgacccacgagctcagcgtcaaggcaatcctcccgtcctgtctcccatcttgccataggagtcctgtctcccatcttgccataggagttttgcaattacagatgtgagccaccacatccagtttttcacatgggttccaggaactgaacttgggtcttttggcttgtgaggctagtccttttaccagctgaggcaacacccctgttctcaaaggctctattaatcctcacaggacttgatagttaccttacccagtgtcaagtgaaaagtttagcatgtctgacccctagacttctttttgctctgtacgggttaatcttacaagagttaaacaacctcagaaaagctgtctagggactgagtgaccttggaaaagaggatctaaagatacccatctgaggtgcacacataggtacacacctagacacttaatgcgtgataaaggaggtatttcaagaaccatttatgtgggaaaggaaactagtcagcccctcaggttgctaaggagaatatttctaggattaggaatgggggggcagtattttttaaaaccacaactcttgcatctaaaacaaaaagaggggtgcttaaagatgcaatcagctccattccatcagagtcagatgtatgccggcaacaggggcgggcccacggcgggaaagagcagagaataagcaatgcaggcaccaactcttgtgtatttccctgactgaaccgtctcccagtcctcctatgctatatatgttttcccactactttaaaaattaaaatagggggctggagagagggctcagtgtttaagagcacttgctgctcttgcagagaacatgggttcagttcctagcatccacatggtggttcatagccatccataactccagactcaggggatctgacaccctcttctgacttctgtaggcttgcatgtggtacacacacagagggggggagggagagggatagagagagattggacaaagttgctaagatttcattaactggaaagttaagcactgcatcttgaggtctgtgccatccacagaatatttacaaaactgccgaagaacagatggtgtgtattttcatagatgtgtctttagctatattctaagcatttctattttcattgtcattaaaaatatttaattataatgataacctctaaccttttttttcccttacacagcaccttcacagccattcacattgcttttctcagagcagccctgcgggaggacacagcgtggaacgtgccactgccctccacatactaaccctgtgtgggcatcacagcacctctgcagtgtgcaaggctcacactgttgtccagtgtgcaaggctcacactgaccgcccagattccccactgtttacctgagacctgctgaattcattgtcagtgcctccgtttccccagttgcaaaagggctacttgggttgccatgcccttactagggtgcttggcatatatgactctcattagtactagctggacatcaacagggtgacaactggagagaggccatgactgcccagggggaggggcaacacagcaagggagacacaagagatttcatactgcaaagaacacaggaagtgagggcagcagaacaggaagtggatgcatgcttgtgctcatgaataaccataccccagacacacttgggtagctttcaaagtgttgctcttgtgctgtgagaacacgcgcccatgaggcaggcaggactgagaccatgccaaccttatttcttcctgagaatccgtgtctcgggttcaacatttgttcaaatgcagtggtttaaacaggggagctggcacagagccagccaaggaccctcattcactgggcttcgaacccccacctcagtcatttgtccagctagtctttagtggcaccaagaagaacaaaattatctaaaataaagaaagtaaataaagcctcaagcagttaaaagatgaaaactgcaaaatgaagggatggaatggaaggagggaggagggaaacaagaaaggaagaaaaggagggagggcagaaggaagaaagaggaagggaaggatggcgggcgggagcctaagaagaggggttagggtggcagtctgcactgaattaggaaaccctggaaagctgagggttgataaaaaataaataaataaaatcaaaagtcccttctctgtgggagacattatggatgtctactcctcctccaaaggtaccaatgactaaccagtgtatgactccaccaaagctcacactgggaaccagtgagttcattaggctcccttgctgagcagtgggagttatgggcaggagaataggtggccttcaagtagtcacactggaaggtctacatccagcatggatgatgactccccacaggccacatagatagacacgagcgcgcgcgcgcgctctcacacaccctgcagttctttgcagcctatacactcctagccccgccctgagtgcagttagggcagaattacacagacctggctgggaggggcacttaagtgaggatctgcccctttttccctctctgatgagggaagactaacagtcagcaaacccaaccgtggtgatcttctgcaagcagacacagctaatgaagatggtggcagttgggctcagaggccagtcctgtggaaccctgagatgtgaaccatcctggtggccccattgagctctgaaatccattcctcacctgttcctgggtcaccacaaggaagcttcctcctccatgtctcaggtgcagagacttatgggcaacacccccaccttgagccttctggtgcagcaggacccacaatcccattctgattccttgtctcctcttgagaaaagccccctcatcctccacaccctccctagagttgagagagagcgcagtgcatgacgggttttcttcccatgagcagcaagctcgccttcaagaacttatacagtgaaggcaaaagacctcatgctcactagattcggtatacgttggttgtcagtcttgaaggtttgggggttactgtttgcagcgctggggttgaacccaaagcatcacgcaaactaagcaaactgaaggcctctttggtcccgaagcagaaggttcatttggcgctgtttaacataaaaagcatacatgggctcttatgttctacagaacatgggtcctcaaatccagactgcagtgccaaaatattctgtagaccttcccatgagtcaggagcgcatgctcactccaatgggggcctcaccggggaccctaccggccctgtgacccgatccgtgttctgggctcctatggggtgctttctttacatctgcaccttgcatcaggaaaccagtggtcaagttttgaagtccctccccgtccaccgggtacacagggggcagcctgggtcccagaagggtggagaacaagcccggccctcctgggcaccccagcgcctaagcagagcccggggtgcaaagccagccaaaggcggttccctgaatcacccccggctccacctcccaactttcaacctcaataaaaccaacttgctggcggctcacaaaggctgcccagcgttgagaggcgagttgggctcttcttcagcgtgcctgctttcatttccgaacgtctttgatttgagctgaatgagccacggcagatgggcccgggctggggtttgaaaagactttggtagggtgcgggataccacgtctgcccacgcggagtcgcctaaccagcggccacgtttcaagggttttcctgtgcagtccagtttcttagaactgtcccacggcagcgcagactacagaggacttctgtcctcccctgaccctgccggccttcgcagctgggggactctgggaatcacttccggcactgaaaaggttaattgtctcccgctgcgaagtggaagctgagaaaagggtccagggcaggggaggaattgcggtaaatgagattttctttatagtgcgggttcattctctccgagatgaaagggcactttcgctggaaattccaaatctgctcaggaagccttcattaggatattaaacaagacttaataagtgaaagtgatttgcatggctgataatcacggccattaatcaagacagcttctgtctctctctctgcaatatgtttcatgttccattgaaaagcccctttaattctggagggcttcttaaaggggaaatattgcatttagccattttttaaatgatttacttagcaaagatcactataaataatggtctcccccccttcacagctgtaacgatcagaataattaatactgggaggtttgtgtcagagatggggccagatgtgtcccatttatcagtcgccggctgcacttactctaataggttccccggcttttaaagagaacattaagtatgacccaaaaaaatcaaacattctgtactcctactccaaacgcctgctcagccaggtcctaggtcacggtgggggctgatgccttccacgtcaacttctctgccactcaaatcatctgacatccagcaataaaacaagacaacctgtttgtggcggccaataaaattagaaacaaataaaaagaaagctatttagcagtgctggcctccttcacgggcagctgcccctcttaaaaccagtgacttcagcatccagacactttcatgggggggaaggggctgctttatgacaatttaggaaaggaaagaaataggagttaatactttgactcaggcaagaaaaacatcaagggttttttgctgaatttttttctcttttctttttccttttcttgcctttttttttttttttttttttttttttttttattcctcacaaatgaattacttctcaaggtcttaggaacaaaagatcaaggccatcttctggcttttcatggttggaaactgcggggacaccaggttttagatgtcgctgaagtcaagggtggctggcggaggtgagggcagggctctccacccaggacttctgcccccgtgtaggtctttaacttgacggatgtcctctgacacggtcccggcagctgcctatggcatgtatggacatctgggagtttgtatgtaaacacgcgctctcacgctccatcaggaagatttccatcttttggcaaaattcagttgctgcctctgtcctacttgggtgacaaaacctactgtccccttccctgctgctcccatggcctcactctgctaaaattcactcaccccaatctctggaggcttgggagtttacttgggggtggtgttgctggtggtaacagggacaggatagtttccaaacactgggactcagcacaccgtttaatcctatgcaacagaagagagcagaggagccctccccagtgcttcctcacagaccagagacatttcttctagagctgggcatccagcagacaggactgaattcccagccatgggctccatcactctcttttatttactttcttatttagtttcctttttttcttcttagatccctcacccctactcctctgcattatttctctagcttgccatgttttaccccacggcctgaggtggttcatcttcattgtcaatttgaatggatttataatcaccatggaaacacacttgtggatatggatctctattacgggatctccagaaaggtataactgaaaaaggaaggccggtggcgaatgggtctccattccatgggctggattgccaaatacaaaggaaaaagctggttaccccccatggcttcccctgcatggggacggactgtgacccctcaaactgtgatccaggacaaaccctccctccctgggaggtccttcatgtcaggcatttgctcacagtgatgagaaaggtaacaaataagttgccatagtgacccagtgatcacctctacctgggcacttgtgaaatatcaaagcgcagagaggccccagtccttccaagaaaacagccgcatcctaacttccagggcaggaaagggtccaaatgtacacaggcctgcaatgaggccagatggaagttgaccacagttgtcatgttttccagatgccaaacctcaaacagcttttcaaaaccaccctgtcccttgctaccatgccaggctagaaagaatggctacgcaggtgttagggggtgatgtcatttccctgaacactctcagtaagtgtacaaaggtcctcataactggaagaaaaaaaaaccacatggctatagccgtgccctctgctgaaaccccagaatatactgcatgcagcctctcagctattcaggctgaaaaccaaagttggctgatatgaaacacaaggctgaggaaatggcctagtcagtaaagtgctcactgcataaatgagaggacctgagttccattcaccagtgcccaaataaacaagccacacacagcagtgcatgctggtgaccccagcactgccggggtagagacaggtcattcctgggggctagctggccagctagtctagtaagctttaggttcagagtctcaaaattaaagtggagaattactgagagagacatatgacatcctaacatcttcttcttctggcctccacatgcatgagcacacgtcacccatagctaaaaagcccccacagacactcccacagtccaatgtgatggaggcaactcctcagtggaaatttcctcttctcaccaggtaggtcacgatgacaaccagcaatagccatctcagactgtgtacaaggactgaacctcagtttccttcacattctctgctaatagaacagacttttaaagaaataaattcatgagaacaaagattggaggggaaaaatcaaaatcttattttggaatcttgacagtgaataagtgaaaaaaaagtcctcagatttggaaaaaactgctttgtcaccactcctgaaaagttcagagtccataaagactcccagcttggtagcacctggtgccatggaagcagaggtgtgggggctaacagcagcctggagcagggggattaacaccctgcacaatccaccaaagacaaagaactaacctccccatgtggccagcagagtggcttcctctcttgagacctggaggctggggcaggagcacctgagatgcagtgccagactggaaactgaacagagaaaattcccatcaggaatgttgctcagagccaccctcatccctcaccaccattgctcccagaaaactgactgacagcaagaaggttgaagtctctcaaacaaggagtctcatcagcactccccaaaaaaggctagagataccatcacagttcccaaaagaaaaaagcggatggccacaaacacaactaggcacacacttcccacccagaggtgcatttttgtctgtctgtctgtctgtctgtctgtctgtctgtctgtctgttcctgtttagtttttcagatttttaagacagagtttgctatatatcccaagctagccttaaaatcaagatcctctaccttggtctccccgttgctaggattataagggtattccactaggatcttatagctacgttctataaaatttgagcaggtagctgttactggcatttggaaaattcatctagaatgaaaatacaaacttgaagttatagaggccatgccagaagaaacaataagattagcaaacaacactccctagcctacaatcatgactatttccagaaatgagaagccagagcaggatgttctgcaaaaggagcagtcagagaagaaaaggggactggctaaagagatggcccagggtgtaaagtcttgccattcaatcggtgagttcaaatccccagcaccaatgcaagcttggatatgtagtttatgtctgtaattacaacattcctgtgccaagacaggaagtagaaatgaaggacccgctccccgttttggcagccataacagcttgtctgaccttgtcttagtcactaaggtcagatgcctgtcggcagccataacagctgaacacatgcttgtctgaccttgtcctagtcactagaaagtcagatccctgcctcgtggcaaggaaccaatcagaagttagctggtggcgctatgctttacggctctgggtgtgctttacggacaagtgcacagcaatgacgcacagagcatagtaaccaccctgggagggcctatgagccataacaaccagttgaccaatcaacacagggcaagccctccaagcctggaggcacaccaatcgtgagcctgtgcgtacccctagacactccccctacactgccctacaagatctctatgcagcctgtttgagctgtctttgctagccatccgccatggcgggtgggtgaaagaccagagctaacatggggttagctccttaaacaacaataaagcctcatgctgtttgcatcaagctttcgaatctgcctggtgattggggtgaccgtggtcctgggctgagaccccggaggcctgagttttccaggggtctaacagaaacagaagaaacccaggaagaccaaggcacatgcagagacaagaaggcaagagaccctgtcccaaacaggtgcaagatgagggccaacatctgagcttgtcttctcacctctacacaggaacatggcatgatctctcctctctctctctctctctctctctctctctctctctctctctctgacacacacacacacacacacacacacacacacacacacacacacacgggatgatgtctggtgggagaggaaactgagacaactcagaaaaaaacacaaagacaaaaagatgaaaaacagattaaatataaaattagaagactagtacatgaggccaaatatccctgtaattggagtccgaagatagaataaaggcagaggagatgacaattaatgaaataaataaaatctctcagacacaatgacagtgattccccagatttacaggacccaccgtgtacctccaataaagagtaagaaacggaagtgcacaataaagagtaagaaacggaagtgcacagcacgtgaaacaccatcaccgtgacaacaaaagagagtgtctacaaccttctagagacaacaccaggtactctagatggcatcaagcctgtgcgtaagaccagacttggacccagcaaccctgggggctgggagacactggagaaatgatcttcaagtgtttaaaggaaaatgatttccagcctagactcagatgtccagatgaaactgtaagctggcattaaagtaagacgaaaactccttcaaacagacatgctatcagcgaatttattccacctacaccccactcaggtaattactgaagagtgttctagaattaaagcatcaaaaggaaaacgaagactggactcactgggggctagagagttggctctggggcccagtgtacactgttcttgcagagggatctgagtgtggttctcagcgcctgtgtcaggcagctcgaaaccacagtgactcaagctccaggggatctgacaccccctctggcctttgtgggtaatgcattcacacgtatacatgaccctcccccaagacacttatatacacacaattaaacacaaagtaaacctttgcagaagtaaaaagactggactctgaatacagtgtgtgggtctctgaaagtggtgtgtccaatgcttgaggagatgtggggaatagccaaggtgatgacagacagacagctgccctctgatacagacaggggaagcccgctggagaggaggaactaaggagagtacctaacgcatttgcaagtgtggacaggagacttacataactggggaaagagacgaacgcacaaagcacggagcagggtttttagaaaaggcaatagtgaaaaggtggcagtaagcctgtgtgactattgtgcaagctaaccctaggaagtcatcgggcgtgtctgcacttgccccttgctccaatcagaaaagaacgctagtcaagcccacatggtgacctcgagtctgaggaccagaagtgagagtgaggtgagggagtgagggccagcggccacggtcatgttccagagaatgcctgccatggaagcctcaagagttggaggccgagttctatgcatttgtgagggaaatatccaaaggctcagcttcaagaactgaaaccaggggctggggagtcaggtcagtgggtaaaggacttactgtacaatcatgaggacctgagtttggatcaccaaaggccaggcattgcagcacacatctgtaactccaaaactggagtgagcatgcactgaaacacatagctccctggagctccctggcctgactagcgccggcctaaccaaccagtgaacgcccagttcaatgagagacagatgctaactgaaaacagaaggtgaagagtgatagaaaaagacaactggtgttgacatctggacttcaccagctcaaattccccaggacatttccaaaatgcagatgtccatccatagtcagccagtatgcacagttctaacacttggaagtcagtaaagctaggggtttgtcccctttaaaatactccccaagctgatacccagggacacacttaaccaagggcagagcccactgagcatggaccagtgagcaatgttcaggtcccaccaacatcttcagtcagatgctctctggggctgctgaagaagtcacacagatggaattgggataatgtgtccctagatttaaaagacctgataacccctgcctcacgataatgccaaagagacccaagtctgccttctagttaataagatttgacccaagttaagatacagacgctggcacaggcaaactgcatacagccctggctgcttgagatatgagtgtacaactggctccctgggtatgcagagcaggtgatgcttgggaagtgagtgcaggaccggctccttggggtgtgcaggacaggcagcaaaggttgttcccataggaaaaacaggcaggagtttggctcaacagcctgcgagtctctcttcctgcacatgtggtaggaactgtcaccttccccagagctaaatacattttatacctaagcaggctttatccaaacacacagtgtgtctgtgctgggacgaatctggcttgctccttgttggagctgtgggatgagctggcctcggtccggcagggagggcttttcatctttttcatggtgacaagcagcctctgggagccccgagatcaggctcaggcagcacactggtgttaactgctgctgacatccgagagcatcatcttcctccaacgttaccgcgtccatcacactgtcacttgacaaaactccacggcagtctcccttgtctgtcacatccatgacagcctaactctgttggcacatctgtagccagcatcacccacaactccgtcatctttttaatctgagctgtcccctccagaggcagggtcagcttagcaactgcgcttctctctggtcagctttagtccccagaaggaaggaggctttgttctagtttcatttctgctgtaattaaaacaccctcacaagaaaaggcagaggggaggaaagggtttatctggctttcaagtccaggctacagcccctcatttctgggaaatcagggcaggaactcaggtagaaagtcaaaggtaggactgcttgctattgcaagtaccattacccctagccaaggaactcacttcatatccaagagtatggcaagaaacatgaaggcggtggaggtttgctggatggcaggcttacacttaactggctttcttatacagttcaggaccacgtgcctagggaatggtgcctcctcagtgggctgatcttcctgcatcaattaataatcaagatatgcctcacagagacactggtgggcccatctgatgtagacgctctctcccttttcagatgatggtaggtcatggcaagttggcagtgagtgctcgctgggactctacaactccctaaggattccaaaagttcagaaacgagacactcatccaagagggggctccccgagggggctttgttcatattaatgtagccctcccccagcacctggcctcaagtcctgggtacatctaatcaggctgcactgtcactacagacagtgctggggacctgtggctccacccaaattccgtcctgactgggccacctctccacacaattcccttgctgtttctcggattcagaccacaaggtgatatgtttggctcaatcatcttcaaggtcccttcgaaccagaaggcagtgatgcacacaaatgtgtattggtgccaggcattggtggcacacacctttaatcccagcactcaggaggcagaggcaggcggatctctgtgagttcgaggccagcctggtctacagagagtgccaggatagactccaaagctatacagagaaaccctcttagcctgtttagctatttaaagtgtatcctcatctgggatgctcaccagtagctcctcctggtttggagtctggaaggcagaggcaccacagggggtagggagatgggtgaggagaggtgggggaggggagctgctatgtccagaatgagccacgagggaggagacacagctgaagatgatgggcatgggttctttctctctgatagagtttggggggaaatcccaggaacttgaagaaccattgtatcagatcccttcaccacagtcccaataaatacagcaattgaacctggacctacttttattttttttaaaaatgttcttcaaagggacttttctttcaaaaccgcatttccaaccagccgttctcaccacctccttgtgcacctccgagtttctgtggggcagatttatcctctccagatgctgggctgctataattccacctgccacatctggctctttggcaggccaggccggaagcttcaaagttgcctctccgctccatacgtggccagactgctggctctgcttcatctccttggatgtaatttttcctttgattcacctataattctgaagagttgatgcatttgtgtccattttgaataaggttctatacaaatgcttcatttgatctcccagcacacccttttatttcctcttcggtggcctcgcctttaattcaggcggaaaccttagagcacagggccggcccgggcatcgcacaagcaggtttgtttgttccatccaagtgccctgcttcctgttcccgggaaagaaaagagagtggtgggggaggggagacagacaggtgcgggctgggaggtcctaactccactctttctcattcagatgccgcctgaaagtgaccagctttgacggcacagtccttcattttcctaacaatccgttcctttgggaagtgctgtctaaaagtgagttcctccttaaaatgtcctagagaacattcgccacctagacggtggttctctaccttcctaaggctgcaacccttcagtacagttcctcaccttgtggtgacccccaaccacaaaactattttcattgctacttcataactgtaattttactactgttatgaaccattatgtaaatagtttttggagatagaggtttgccaaaggggtcatgacccagaggtcgagaaacactgttctacacactttgagcaccgcatcacgcttccgtgagatcaagaccacagagcaaatgaaggtactaaacactccagtaaccagagttttaggatagaaatcccgggctcctacaggacatatgctgggccacccatcccgaaagccaattaaagggatgaacgtgagagaagagcgggagagcagtgatttaatgggcggatggagtgaatattattaaaaaggaagttattagaatgggttatacgacaatgtccgagtagtccaacaatgcctggctgaatcctggagaggctgagagccccatgacttctcagtcagtgagactgggcacctcagaggtctcaagtaaatacagaaggcctggaagagtcctggagagctactagcttccccttggtgggcagctgggagaggctgggttcagattccagtgaagaaatgcagcagccacagccgcaggggctgccgtgagggagcaggtgacctcacagtaagaatgaaagacagtgaggaaaaagccaagcttccaccggaggggccgtccacatttgtggtgggtcttcccattccaaataccctggtccaaagtctctcccaagtatgcctggcaacttgtctcttagttgagtccagatccatccagtccagttgacagcccagaataacggtcatagtgtctgtaaagtgtatgaattaaagttataaaggtctgaggataaaaaggcttaagtgatgataaagtgagttgagacattaaaaagaatgaaatatgttcccgaattctctatttctcatgctactgttcatagtcagttctacaataccaccgtacgatcataactacaaggtcatgattaagatgcttttcattgtcctaaaaaaaaaatctgccaactttaaaatgttaatgctttcagtcaagtcgcttctaacatgaatatgctgctaatgtgtctaatacttacatttccacaaactctaaggattcttgtaagttccagggagctgaattggatccaaacaaacaggtctaagaggtgccagggagttccacacagcctggactgcaatgaaacaaccagctaccccaggtcatggcagcaccccaggcttctcaggtcccccaaagatggtcaacgccccccacgtcagcaggaagcagtcttgagaatttgatgcccttattcctgccatgtttaacaccccacctttttttaataataagtagaggtgggaatgaaaggtccaggctttgatgctgatccgctctacctctttaagagacagaccctgcccctggcaacagtaagggcacgaacaagaaaacatgctacgtcatcaccacgtcacccaccacgcatgaggactctgggcatgttagagcctcagtgcgcatgtgcagttttccctttaaaagctccaactttcctgctttacactctctctgcttcctctctttatgccgctctctgctctctgtttcttcttggctctctctcacctacacactctctctgtctctctatggcggtcagccattacccctgttcctcttctctcttagtctccctattctgccaggcatctaataaactagtcaatatgtctcatctgcctctttccctctttttaaataaaaacataacagtgtctgctgtggtgtggaggctttttaaagaattattacttttaatctatgtatatgtgtgcatgactgtgtgggttcatgctaccaagtgccctcggaggccagaagaggtcactggatcccccgagctgtcggccatgatgtgaacactgagaattgaaccccggtcctgggaaagagcagtgagccatctacccagcccccgagcatgtatctttatgcatcccaaaggcccatccatgtagtaagacttgtccactgtgagctccataccagtggtaaatccttgagtccttgggggggggggtgccctgaaaaggattatgggaccttagcttttcctcatcttttgcttcctaaccacaaggtaaataaaatgccctgctgctaattaagttagaaattcgagagaaatggacatggattgcagagagctcattaaccagtttattgtagggcagaagagtgagaggagggagagaggaatagaagaagagagcatggcagagagtaagagagaggagcgacagagcagagggtgtgagtgaagagaagagagaagagaggcaggggtagatggagcttttaaaggaaaaccgcgcatgggcactgaggttccacacatgcacagagtcttcacacaggtctgtaattggagagagtgacatggtgatggcatagcatgtccctgtgtgtgccctgcccgtcgtcagggggcggggtcagcctggtgtgggtcctaacacctgccacacacaactccattattgcttcaaggtgcgcaaccagaggtccaaagcagtgggtctggcccatcttggactagaatggcaaaataaacataatcactttacaaattcattggcactcgctctggagaccaggctggcctcaaactcacagagatccgcctgtctctgcctcccgagtgctgggattaaaggcgtgcgccaccaacacccatcgaccttggccatttctaaaatcactgagagccagaggctatcatgaatgtttccgtaatctacagcattaaccaaaaaaaaaaaaaaaaaaaaaaaaaaaaaaaaaaaacccaaaaatcaaaaaaaaaaaaacacaaatctgttttatttgcttttatagaatgttttttttaaaggtccttaaacagtgatgattaattttaattatcagcctgagtagactcacaaatgtcgacagcaccagtgagggccatctttgagagtgtttgtgagggtttttccaggaaggactcctgagggggaagacctgtcctgactgtgggtgactcagtgttgaagaaaaaggagacagtgacctgaacaccagcattggtctccctttttctgcttcctgatccagctcgataggaacaagcaagctcacactctcgctgccacagccagcagtgcccctgctaatccttccatcaggatgactacatcccagaataacccctgcctcttaacggtttccctcaggtgcttgctcattccctggaacaaggaagggaactaataacgttgtctgtgtcacttgttggcctgtttcctttaaattggttcttctcctagcctgtcatttttctatttcttctatgaacaaaacaaatttgctagagctgaagtaacttgaagagccagtaacatgttaacagagctttgacaataaaccacaggccctgtgatgttggctgtaacagattctttccatcactgtctaatcaagacttctaatggtctgtacacagtagcaatgacagcaaggcttcaagttcaatttcctaccgacaccttgtctccccgtaagcaaataagcagtacaaacctgcaacccttggctcttatataaggagttggaaggcaagaagtcaaccaacagacccctgaaccctgggatttctagaagccaggcaagcattctttcactcggcttcatcgctgtcctttgctttttgttttaaagcaaggtctcactgaattaactatgctggccttgaactcacccggttgctcaggcaggtcttgaagttatgatcttcctgcctctgtctctggagtcactggcatgaaaggaataggtctggctgagccactgtcattctgtgttttgtgtttgtttgctttgtttttcccccatttcaatttggagcaactgggctgtagtgagcagaaccttcagcaagaaagcaatgcttcagcaaggaaataagccacgaattttacaaagcttgcattgactaatggaggtcaataagaagctcattttcttcccactgaggagtatttggcacttgtcactccacccctacaatgcagggtcatctcttttgagggcaccttccaagaggacaaactgtcccctataccttgtaatgtttccagtgtttagctgttacatgcaataaaagtccaaggctaggatgatgactcagagaataagatgcttgctgtgcaaagatgccgatcagtgttcaaatacccagtgcacacgcgtgtgcgtgtgccacacacatcagctgacacacacaaaataaaggtaatcatttaccactcagtttacttagactttcttcaacagaagcgacttccagtgcttctccgtagccctgcagatgttctctctctctctctttctctctctctcttaaattaaaaatcataaactttctgtcccaaccaactgagcacaggattacaggtgtgcaccaccacacctggctgacctcttttttttttttttaagaggatttatttatttttattctaaaggtattcatggttgtctgcatgtatgtatgcacctcatgcatgcctggtgaccatggaaagagcataaggtccccaggaacatgagggacaaacatttatcagctaccatgtgactgatggtaactgggcagaggtcctccataaaagcagaaaaaaaccctttactgctgaaccatctcttcagccccctggctggctttatttatttatttttatcaggatatcattttcatgtcacatgtagtcaatctcaatataaaaaaagtattttctctagagcttaaaaaatattttattcctttaaaaaaaaaggggggagcagccaggctgagatgtagtggagtgttttttgtttattttttcttatcttttatgccattaatagcaactaagagtttgtatcaaataaccacacatcacattcatagttaatttcatttcctaccaacatttctagtctgatttttaattttccattgttcagcttagcttttctagtgagtgtgctacctcacacaggttaaaactaattactttaacagcatttagtaagcaatccattatgcatcttacagtagacctaaggtcaaatcttatattttttattgaaatatttcatctttagtcatacctggaaaacacagcacttagtctttgaagtacccaaagaatgtcatcactaccggttaatgtcatgtctcttagtaacaaatggaaattctacatggcatgaagacacatctgacttctagaaacactggcaatacacctttctctgaccaatcatgtcagctccatcatgataagtgtgttcttgactttttcagttagtgcctaactctgaagatgttttcttcaatttttaaaatatcaatctgtatttcaggtgcaaaaacactagaattctcactctggttcctccattcttccttagataatcccaacattatgtgtagcaagcattagacttgaacataagttggtcctgtgcacaaccttgtcgatctgcataaagtgttcctgtttttatttcatgcgggattccttctctcctactttgtaatcctttataacaggtagctttggctgcagtaacaaacaacccccaagccgcagtgtctcacaaaaataaacattcacctttgcccactgaggttggaggaaggacttggcaccatactaggcctgtctatggtcatcttttgggctctgtgtcatagacatttcttcacattccagaagcatccttgattgcaggcatgtgagtctcatagaaggaatggaagaccaagggttggtagacatgggtcagtccatacagtcaaatgatgcctctccttgatgatcgtgtgagtgaccgctcacatctctcaggtgggcttgcagacctggtacctctgtctgatagtttgggaagtgggatgaatagctccacagagaactccaaacttctgacagccaagtcaccacctgacaacactaggtgaattcttctaggtgcctatgacattggataaagtctgtgacagccaggagtgggagacacccctgctgggaggtcaaccttggttgtcaacttcactgggttgagaactgtctggggagcaaagtcgccactgaaagagttctccaaagagtgctgacgtgtggagagaggagagagcagcctgaaacatgagcatagccccgcagtagacgctccaggaaggatagacatggaagaagagagccatccaggacatagcccttcttctagaacaacagtgtgagctggaggcaggaggagagtggcttgtaggtaaagtgtgtgagaacccgagttcagacaccccagaacccacattaagaagctgctgtgagccaggcagcagaggtgcatacaatcccagcactgaggaagcagagacaggctaatccctagggcttgctggccagttaatccagcctagtgggcaaattctgctccagtgagagagcctagctcaaagagcagagtgaacagcacctgaggagcaatatgtgaacttgatctctggtacacgcacaagcacgtttgtgcacacacacatgcatccacacacaggtgtgaatacacacaagcacactcacacatagagaaaaacaaaacaatagcctggtgtttgtggtgcatgcctctaaccccagcacttgggaggcaaaagcaggcagatctctgtgagttcaaggccagcctggtctccaaagttacacagagaaaccctgtcttgaaaaaacccaaaccaaaccaaaccaaaccatgttgttgctgccctcctctttggtcatcagctttcagcatcatcagcttttctcagagtctctgggcattccaggtcttcagcctccttctggagctgccttgttacatagagcaggctggcctcaaactcacagcaatgtatctgctgcctctgcctctgagcgctagctagggcttaaaatgatcaccactacattcagctgggactctcctgctgtctcttgtccaggggcttccagcttcttggagtaagcagcctatcaattctctacctcccagtcctgcagacgcatgttgttggagcttccaggctcccaccacctgagccaagaaacaaatccccttcatgactgttcactgcagtgagataggctctgctcatctagagaacccccgataatacattagagcagaaggctctcaaactctcctatatggtattgtcagaaacagccaattaaacaaaactctgaaggtctagggtagcttttgggaagccagctctttctaataggggggaaaaatctgggaggtgatagcattttcagtcaagctggatacaaacaatctctgtaaatctctaaatacagcagtgagctagtacacagtgagacaaggcaggtaggccaacgtggcccaggaacaaatctttgtgtaagaaaattttaaacaaatttatcttcttaggtcacagaaggaaatttccaagtagaagtcatttagtaatggctttaacgaatagataagcatccattgaggttggcacatctaattaagagaaggaatacttctgtctgcctggaattactcaccaatagaatgtaagcagacttgagcacaggtgtttttgctatttttagaattttccaaccaggggcatctgacttgtttcaatttttattgttttggtcagttagtctaaagaagaaaccaaagagataatcacaaagaaataatgttgctaattcctagagcgtctagaagctatataggtagtggtttaacagcatcattattttccatgctctgggagagtctgttcaagggttcaaatgttgggacctgacaaggaaatctgcagcattgtctctgtaagctgccaccttgattgtgggaacccctgtttgtgggccttctgttggatccagccaactagcccggttcatccctgagaggggcagtgctgattgagaaagggcaggtaaagacgaaaagaagacagagacacaggatagagtcaggagggcaagccagggaatactaacacaccaagtttattcttcaacattcttaagtaccccaaccaaaaagagggaaattgcaagagacttctattatcatgtataaggaacaaacaaacttgcttcccttaatcctccaagcatttggtaaccacacctgttatccagtcttgagagtcaagagtgaacacacatgagaccaagtctgttatttagacaagacattctgcaatagccaaaccttagaccttttgacttactaagttttgaactctctgaccttgaggcaagaggaagtggagacatctttatgggccctgacacttgatgatggactgtcattgcttattgatagtggtaaagaagtcccaaatcatacgagaaaggccgtctgaaagctaaaggacactgctttaatttgcttcgctgtgagaaacactgacccaaagcaacctggggagaaagggctcattttatcatacagtttcaacacatttccaatgcacatgggaccacaaaggtccaaagaaagcacccaatcccaagaagctggagtcatgggagggttggtagatgccctgtgtgggtgattgaatggaagaaactctggttgtctggaatcgcagcgagcactcctactggtccagtgtctctccagctcctggaagttcaaattctaaacagacctgtgtgttcaaacagttcacggggaagagacaccaggggcactcagtgtaggtctcagtgatgcagatcttactgcagacctaccctttaaggttcaaaatgatgaaaaaaaagaaaccaagtgaaacttcaataactcacagacgtccggaggatcacaaaacatccagatgttcaacaatgcaaagttcataacttatgtctgacaaagactcacagtccactgctcagtgagagagccaggttgagacaggccacaaagtctcacgtgccaagcacatgacagtggtgctggttttccatccagagcacatcaagtgtggctctgcacagggaagggccctcattagcgctccctggctggctgtttctcactgttcatacaccagctcatcagaaaactgagttccccagctacccgacaaccactgggccttccggtagcagtcacaaccacagtagtcctatattattatttatttgctgggcatatggtatttccttcccaccactaatgtataaagcataggtctttctgcgtcattctgcctgaagaacagcaccagacactgatcctgtgttcaacagacagccgtcacagtgtaggaacgagcattgggagaacgaggaacatggaacaggcttcccaaagatggggaagggttgggggttggagaagactggacagtgagtaaggacccagtggaagggtagaaggaaatgacctttcagagagtggaagaaaaagtcagtcaaatcatcaaaaatagagaaagaaactggccttggataggaaggtgcggcccagtagccggtattgcaggggcagaatctgtgacataaaagttagttctgagagttcaggacaggattctgagcaggtgagagcatacagggacaatatgctgacaggcctttgcatctcacctttaaaaaacgtccttctattccaggaatagtggcacacacctttcatcccagtgctcgggaggcagagcgtgaggccagcctgatctatatagtgagttccaggacagccagagctacatagtaagaccccgtctcaaaataattaattaattagttatgtcaattaattaattgattgattttttaaccagtctggcaggaatgaagatattctaaagagacacttgtgtcttccactctatcacactgttgacacaatggaccccacataaacaggacttttcccaggaatctgtgctgggagaaggtggcagccagaggaggatcttctcttcttgaaagagattccacccagctctaactagtcagtccaccttccaggaggagactgaagctcagacaagggtggggagggccacagttcaaccaggactgcttagctgtgataccctgggcctctatctaagctctggtttcactgcaggacaccaaagactgacttgagggttctctggatccctttgtctctcttccccatgtggccacattaaataagtctccttttgctgcctccccttttaatttggctcttgctgcctccccttttaatttggcttattgaggagaggtggctggacctggcttggtgcatagattgtgaccgccacctttaataacattttatttattcctctgtgtgtatgcaagcatgtgtgtgtgggcggggggggggggtaaggggggtgcataggtcagggaacgactttccggagctatggttttttttccttccatgatacaggcccagggaatctaactcagtcttgtagcttcacagcaagtagaccaggtgagttatcagcattgtctcaattttcagggcaataggaaactattggcagaattaagcttggaattaaccaggttggtgttttgaaaattgtcctgtctgtggcctggctaatctctccaaacatcactggatgatgcctaggcagattgtgaacctgagatagggagaccagcaaggatatgaggactgtcatgtaagcgaagggaccagctccctgttttggcagccataacagcctaacacgtgcttacgtgaccttgccttggtcattggaggtcagatccctgcctcatggcaaggaaccaatcagaagttagctggtggtgctgtgctttacggctctgggtgtgttttgtggacaagggcacagcaatgacacgcagagcatagcaaccaccctgggagggcctatgggccataacaaccagttgaccaatcaacacagggcaagtcctccaagcctggaggcacaccaatcctgagactgtgcaaccctagacactccccctacgctgccctataagatctctgtcctgtggcttctcggggtcttttcccagccatccgccatggtagatggatgaaaaggcccaagctaacttggggttagctcgttaaacagctacaataaaacctcttgctgtttgcattaagctttcgcctctgcctagtgattggggtcgccacaaaagtgattgtggtcgccacagttgtgggccaagatcctgggggcctgagcctccagggtctttcataaggatgattccagcagcttcagcaagggtgaagagaggggcttgagtgtcccctaggcctcacaccgtcagctggagccgccatctctgccctgcaggtagatgcgggttttcagaagggcagaaatcacctccctaatgacattccctgtgatgaaagtgttagctgacaactgacaaaatacagagtctgtggggaaattgggccactgggcatggctgtgagggacagtctctgtggccgtaactgaaagacctggactgtgtaaacagaggaagtgctgaacaacagcaagcaccattgctctctactttctagttgtgggtgttcagtggcctccatcttcaagctccggcggcctggcctccactgtgatgacctgcacagtgatggacagcagcactttctcctttcttttgctttgctcttattccatcacagcaaccatcccccaagagtctgccggaaggagtacttaggaaggaatggtaattagagttcctgtgtttgaggaaaacactgttgaagtgatgggaccactggtaggcgggggaggggcaggcatcgccaccaggctgtgaggctactgctggttgaacctgaggtagatccaggtgctcaagggcagtggcaggacagacagacagacttcgattccaccttaactcttcccttatttcacacagacctgtctctttcccaggtttctgcaacctaatcgttagcctcagacagccggggaactggttgagcaagaagccccatcttccaaaacaaaggcctggaaaggaaatggcaggaggaactctaaggcatctctcagagaacatttaaatgctggttttcctcaaggagaagggctcattaagcccaagacccctcgttcactcccggcccctgtttactaaaaaaaaatgacaagagggactctacaaagccagcctgagaaagcggggagtccacttcgtgtcaaacctcaatcctggaaattgaatgtttaattcatagagtaaattataagcgattacttctgcaagtaacggcaatgtccttaaaattattctttaactgaggaaaagttttttttttctttgacctttggagaaaatgcttgcttctagctatgactaaaaagaggtcttctcctctctctgttgtgttaagaatcgtttcttctttatagagaaggcaccacagtgatttataactgtcataaaagcctggaatccttttgaggttaagctactcagctattcaacttttactacagaaactttgaaattcaaaaagaaaaaataatgtaagtttttgaaggacatgtgttgctgtaggtgagcccgttaattaaaagtgattgcctgctaggaaatcagactttaaaaagtttcacgaatttattagagcctgaaggtatctttgtatgcacagagccgcaaagccggctatgcaatttggtttcagatctgcttaaagccctccctacactcccagtgcagccaacagctcggctagcattcgtatgtgttttggctaattgaattgtgtgaaaatacacactaatgaagccttagcaggggtgtttgccgagtagactcctcagctaatttcctgtgaattagcagtgtctttttttttttttttttttttttttttttttaccacagattaatgttttagagaaggctacctccttgggggttgggagaagcaacacattgtaaaatactgggcttcattttttgcatacttaaaaaaatgtcctgtactctgatagctacggtgtgagagaaacctaagcgggatttttaataataatatttaaatgcaccattctagaaaaaaaaacacgtaattatcaatcaaattaataagcaaattattaatcttctctaaagcatttggagttctgtttccatttccttctcaaacacttttaagaacgattctgttcggtttgggttgggttgggtttaatgaggattattatttaatggtcctatttgggtttttttttcagcatgtctatttagaaatattgcctcataacatttgttgctgtgattctgtggtccctggatgccggtatttgagaaacacgctctgcaagcgccgaggctgtttttcagagtaaccaggggaactatcaaagtctgtttgccgagagatgggcagagggaagactccaggcgcaggactcaccccactgcagtctgctaattgcctaccaggaaagggtgaccagggcgctccctgtggtggcgtggagggtcacagacacccctggggctcattctcctcactcctgctccttcgcactgagtctctacagcagaggatgaggccagctccgaggcagctcctggccctgttcagaaaagcatcggggtcccttgtgcaccaggaagccaatctgagaatccgtggagctgaaacttgtcaaagagatccaagggccacacatcctgaaaacagtctggcaaagcttgcgtgtacttgggatacaggaccgtactcacccacacctgagacacagttgcccctgtgcaattaagatgggtaaagggcacttcatcaaatgaaaatgaataggattaatatttgcattatttttactttattggttttgagaggaggtctcaccctgcagtccaaggtaggtttgaattcagtaggtaggccaggctggcctgggaactggtgatcctcctgcctcagcctcctaagggcttccatgacaggtgtgtacaatcactctgtactgtacacagcgtactgtctcttcgtgaatgctttgaactgtgtgggaccctcagatcacaaattgaaacattgcttttcagtttgaggccagaggtacaatcccagactgtgacttgcccagatgctcagtttttaccattctggcagaaagggtagacatggtcaataactccttatctctggtggccaccgtctcccaggatccagggccatctgtggcccatactcctgccctgtcagttaaccctggtagatcctcgtggtggccctcaccctccctgcctgtgacttccttcttctgttttaacaacagccccattctagtttattttataagctttcaagccatgttcagtgagttctcttgctagcacttcactctgccacaggcattggttcctcttcatgttgccagtccttggcagcctcagtttccaaacttggtcaaagaaataccctaaagcaagacagtattgtagagcaataatcaaggccaggcttgggcccagcctcgtcttcctgttttaactgtatttccacagcacaccgtcaaactattgtgaccagtctcttgccaccagctgactgccagcctaggagagtgtcctgggccacagagtcccttgcaatgtttattagggactgctctagtatcaacacctcaggaaataaaaagaaggaagggagaagccaagacacctcaatgccagcctcaagccaccatgtgtggagttttaaatcttggatttgccttgggggctttagcagctggcctgaaggaagcatctttattctccagtgctagcagcagtggtggcacctggccttccctggaccagggttcttcagaagaggctgttgcctgggccttgcagcatgtagaacaagctccacaccaagggttttggaggaacccatatggacgctcatcacactcaccttccactttggggtctttacttttgccctgcactctggaaggacagactggtatttggtctcatctttgggaattacccaagagtcaggacacacaggctatgagtgtcattctgtgtctgaattagttatgtgtctctatagacttagctggctggcctgcccccactccctagcccttcctcacgcattcctagtctactctcctactcccaacacgcgtgtgcacacacacacacactcaccacacacacactcacacaccacacatacactcacacacacaccacacacactcatacacactcacacacccccacacacaccacacactcatacacactcacacacccccacacaccacacacacaccacacacactcatacacactcacaccccccacacacaccacacacacactcacacacaccacacacactcacacaccacacacacacactcacacacaccacacacactcatacacactcacacacccccacacacacaccacacacacactcacacacactcatacacactcacaccccccacacaccacacacacactcacacacaccacacacactcatacatactcacaccacacacacacacacacacacacacaatcatacacacacacacacacacaatcatacacacacacacacacacacacacacaccagctcctcaccttgtctttgggactcaagtaatgtgcccagggtttgcaacctctcatcaattctgtacatgtgcccagccctggactccagtctacagcagagtccccagccctatgtttccccaccagaagaagccagacagtactaatctattacacatccttcagtgaactcagtcagtagctcacttcaactgtgaagcaagaagtcacattcttttatggttttccagggattgtttatctttctaataaactcagacaatgatggcatgcactatatatttgtgtttcgtgtccacgtgtgcttgttgcacacaaacatttttgctgaatgggtgtgcgtcagctgatacatagttctttctctaatagatgtcagcaaccttcttaaaacccatggccatacatgtactcattcattcactcattcattcattcagcacaataactactctgtgtcagacatgccctcgtcaccacagaggggctgtcactaactagagctcttcttccaggcagcagccagaagccttaatgcaaattcaaacatgaccataaaagatgaagccaagcccacagaaaatgattatcttttttcataacgtctgttttactgatatttttaaatgtgctcagctttacaaaatcttataaaattacaatctagaaacattttctctgcatactacgaaacacaatagtcaactacttcaattcatgtgaaaaacaaattttgtgctctcaatccatttatgtgtgtgtgtgtgtgtgtgtgtgtgtgagagagagagagagagagagagagagagagagagagagagagagagagagagagagagaacatgtggaggtcagaggacaacttgagagagtctctcctctacctttctctgcctgtacctatggagacaaggtctctcacctaacttgaacttcatcagttcagctaggctggccagccaatgagcttcggggatccacgtctctctacttctggggttatagcaccagcatggctggctttccatgtaggttctcagggtccaaactcaggtctcccagcgtgcacagcagacattcacttcactgagccatctccctagacccaaactcattttcaactttatcacagtatgtacctctgtaattttatacaactaacattacccatttttttgagatagggtctctttatgtaactggctaacaaggaactggttatatagtagaccatgctggcctcaaactcatagagatccaccctcctttgctttcctaagtgctggggttaaaggagtgcaccactatgcccagcttatttcccaaatcctttccacaatttcaaaaacagtaaatagaggtagaagctgcccacagcccgtccttgctgacacattcttttttgtttgttctctgtttcatttgcagatttcatttcctccaggagtcaccgattccctcttgcaacttctagatgcttcctttagggaattttgtacatattaaatttacatggcaatgtcatccattcaaataaggagaggaagctgctctgatcacttcagacagcctccactgtccatcttccacaagttggaatggggaccttttgtttcttgcaaagaacagtactggacagcaggattgtggggacactgtacaccagttaaaaagaagaggggttggggagatggctcaggggctaattgttcttgatgctcttcagaggaccaagtgtggttcccgacaccatagcgggtagctcacaagtgcctgtgacaacagctctaggagatctgatgccctctgcttgtcaggaacctgaacacaagtggcagacacttgagccccacccacaaacacaagaataaggtgtaagatggtgttgtgcagtcttatgcatccagaactcatctctactgacaagacagtatccatccttcatctccagaaaggtgacctccccaggtcagaacaaagctatttatcatctttggcaaggtggcgatttcatcatttgtctgtaatttgctttttccagtgtggttcctggtgttcctctcggaaccagtggaagtcagtgggatttgttcagtagcgcccccagtggctgcttgtgaaaggggaattcaaggtatttcatcaatagcaggtccttggctttgcacttaacatttattttaatccaaagggaaaccaggcccaggatttccatggcttttttttttttccagcaaaagttgttacagcaacctccccaagctgccgaggcttctctggatggttgcagcatggcttttctcactggaggagaggaaccagaggacaacaaattctggagggctcctacaacttactctcactgtagactcaagtctcagtctctactttaagcaaaggagttaggagagagtctaacccaggctctgggcccctctaggatgtgacaccttggcttctttcctgatgctgtgacaaaaaagaaaacaacaaatcaattacgggagaaagggtctatcctggctcacagttcagagggacatggttcattatgacagacaaggcagcaggctgaaagggtctatcctggcttacagttcagagggacacggttcattatgatagacaaggcaacaggctggggaggcacagtgcaggagcaggaggctggctggtcacatttgtcacattgcatctgaactcagggagaaaaacaaatgattgtgtttagatctttttacacacacacacacacacacacacacacacacacacacacacagagagagagagagagagagagagagagagagagagagagagagagaaagtcaggatcaccataccacccagggaatggttccacatagtcccactgaaataacccccatggacattctcaggagtgccttcatctagatgatccctcacaggcatgcctaggtgcttcttaatctagatgatccctcacaggcatgcctaggtgcttctagattgcatcaagttgacagtgagattaatggccacatgtgttttccaaatcagtgaacactatcaagggcataacacattctgattccccccagcaatagagacacctccctgcagctgctgtgctccaatctagaaaacagagtccccagggttgacttgtcctatgtcagagaaagtgtgaaggagacaccagatctcagactctacatttgctcatagtgtccactcagtggaattcctgtaaagagtcaatggtcacagtgtgactccactgtgtgagtgtcactgagagcttgtatgtgtgactgagtgtgagtgtgcgtgtgcatgtgtggtgtgtgtacgtgtgtgtgtgtgtgtgtgtgtgtgtgcatgtgtgtgcatgtgtgtgtgtgtgcatgtgtgtgtgtgtgcgcgtgtgtgtgtgtgtgtgtgtgtgtgtgtgtgtgtgtgtgtgtgtgtgtgtgtgtgtgttctgtaaacaagtatttaacaagaagtgatttaaggaagggcatgtttattctggtccatggtctattgtggtaggaaaggcaagagtcaagagtagctcagggccgtggcagtcatgatggacgtgaagctgcctgctcacatctgggtgaagacacaggaagctgggctatgaacttcaagtccccacccccacccctctacccagagatccattctatcctcaacctccccaaacagaagcactagccaagagccaaacggtcaaacacatgggcctgaggaacatttacattctaaccacagcacccacttgtcctgtatacagtggcagtgtcttcctcctcaggccaccttatggattctactgggtaattcactccttagctttctcagaatagaaggcaggagctgacctctgccagcaacctgcctttgttgaatggatcttttgttccctccaacctgtttgtctgtcttcctcttccttctcttctcctcctcctcttgtgtgtgcatttaagtgtgtatgtggctgtgagtgtgtgagttgtgtgagtgtgtgttcgagtaagtgtattttgcacacatatttgtatgtgtgcagcatgcaggggggcatgcttgcatgtaggtgtacgtgtgtgtggaggccaaaaaaacccaacttcagacaatattcttcagtcagtcctctgtgttttcttgagacagagtctctcactggcctagagtttgctaagtaggctaggctggttggccagacagcctaagggatctccccgtctctgcaggcccggggccaggttgcagacacacatcaccacaccttattttctacttttatgctctaggattgagcccatgcaagcggaatgctcacaaagcaagcactttaccccccgtccctagaacatgtatctttctaagacactgccctgtctatctcaggagtttcctctgggtgagtttttgtacaacataggtttcactttaacgcctcaagtttgcgggttccaaatttgaactgcagtttctcctggttcaagttgcagtgagtgctgggggaaaaaaaaagtgaccttttagtggaagaacaaaggctctggggatgtcttagctctcaagttgcccttgcaaacagagattctgatgagtccagtgtaaaagaatcaggctcttcaggatttggtttctcttctcggggaaagggggtacttattaataacacatatgtggggtctcactcattccaagtgtttgaaaggagatgaaggtatttttccaatactacaaccttgcaaggtcctctgttcctcttcttcctcctcaaaccaagtctgagaagccgcattcaaatagtcacaggctagttttgtaccaactaggaaacaatagcatggtccaactttgacatgaggcagaattgaaattcaaatcttgtgactgagacaagaaaagatgttcacatttgtcacctatgctggattttagcaaccttaaaacatggacctagttagagtgtggaatatacatatatacttttagtgcttttttgttgaaggagagctgcctatagctataaatatttcttatgactacctcagaaggttccagaggccactggcctttctcaccaaatatgggcttcttctgggctcagaacaatcatttacctttacacttttactgtctggaatgcattagggaagcgctgggaggaactgtgagttctccggctcctgccgctgctgtctaattccgacaattaagggatatagacagagtccttaaaggtctgcttgatgcttgagttcaggaacaagaagagggaaagacagtctctacttggggtttatcatctgtgactggatccaagattttcacagacaaaacaactttgtaggcaagaacactatcatgacttgaatgtgaaatgtctctcatagcctcacgtgcttaaacacctggtccccagctggtggtactgtggcactctgggaggatgatgtctacttggtggacgtaggccaccagggccaggcacataaaggttatctttacctcctcttctcttctagctctctgtttcctgtgtacctcgtgtgatacaccaccacggcatccatcactccccaccagggaccaaaatgctcctttggctttgcccaccatgatggacagaaatccctgtgaaatcacctgccaaaataaaatcttcttcccttaggttgcttctgttcagtgttttatgacagccatgagaaaagtaaccaataagatagaccaaagatgacatatttacagtcactagtgtgtggtgcacgttctgaacactccgagtatcgcacaatgtcattttactctggctgccatcttacaagatggcatgctagcatcacaatcaattgtacaagagagggtctccatagctcagagaccttgcccaacaccaaacaggtgatacaaacatccagagccaaggtggaccactctgccacctgaatgccaaacctctccccaccacttccttcaaacctatgtgtgcatacaaagatcaatccaagtgtgtgagcacacatgcgcgtgatccggacaaaccgagaacagggcttgctagttcagtccaaaaagtctcaggactgcaatatttcccatgtgctttaacctacatttgaaaatacatagtagacccttgttatgcacggcccagattatcagcaatgtgagggaaaaaaaaaaaaacactaaaaatgcctttgtagtgagacatgaccactattacctctagggatgcagaaacgtttccctgaaagacagacaaactgagttcaatgtacaagaatttaggggttctgtctctacttcccagggctgacattacataagtggcggtgcccaaactcaaccccttatgcctatacagcacacacgtatctatgagcagtctccccaggtcctccttaccgtgccttctaagagcctgcatccctcctcaccgcctccacccacactcacttcctctcgctgccatctctttgccatccagtctgtcccgaccttcagtacaaagtctgatctccaccactctgcatctcatctgccttactggattctggaagtaggagtccccttcctgctttgatggggcccaggtgaactagtgcaacaaaagaagaaggctaatagaactgcaataaaagcaggagaggttattgaaaatgttctccggctaagtagacacatcccccaaacatgctctgggatagtaagtgtgcaaatctagggaggaaatgaaacaaatacagagatgcctgacatcaaaggatgctcacatcatggcaggatgcaagggccgctcaaactaatgacaaacacaaaaatggtgggtccgtggcccagtcctcttggaacagcaacttgtaccaatagcacctggtgcatgacagggatacatgtacccccactacagtgactgaacataccccagttcattctctgtgtcagcacatgaagactgaggaaagtctgcattccatgagccctgccaggcctggaccacagtaagagaacacagatcacagaggacagcaaatgtatgctaatcaatgtggcaaaaccctgtctggaatatcccatgtttttctggtaactcctataagagaccactaagcaagtaaagggcaggatccatgtacacaaattactcaacagaaagtctgaagagagctgtgctcacactcatctgaagaaggaaaaactgaaggctggagaaatggttccacagttcagagcctgtgccgttcttgcccaggacccaagtttggttccgagcacccaggtggcaccaggcacttacagccccagccgcagggcatcgataggctcttctgacttcattcacactgccaagtccacatacccacgcatagacacacacatgtacacaaaacttaagtaataacagcaacagagagctaatgactgacatatggccaggtggctccatgggtaaaggcattgctgccaaacctgaagaccagagttcagccctcaggattcatgtagtagatggagagagttactgggtcctctaaccttcacccacaaagtgtcatcacacacacacacacacacacacacacacacacacacctacactcacactaaattacatgttttaaaaagcaaaaacagttgatgactgagggtcacacaacataactctacatgccttcctagaaagtggactcctgaaggcccaaagctcctatcctctgcaccaacaatgtctacctcctgagggtgtagggaaacctgagggaggaggggaagagaagaggaggaggagattgctggatggggcaattcggttcttcacatggcagaatgagagttttaacccccgtgaggttataggagaagggcctgactcttgcacctggacgtgtggacagaggtgaccaccctcctcgttcctgtgccacagtgtgaaggcgggcacctgggacaggtgtacttgccctctactcgggctgcattcacttggattccctaagcacttagagagcttttgaaatatttccctgtcagaaatgacctgaagtgaaatctagggcctctgtgtctacaaaagcaatcgctatgttacccagagtgaacagaataaaaacagagaaggttaagtcggcttccgggtgtgtgtgtgggggaatgtgtgcttgttaggcaagggcatgcatgtgagggctggaggtgccttcactgtgactaaggagagggcccgggagctctttctactgggaagccacagcacctccgaggtacctcacactactgtgtgtctgttacaaggaagacacagctggacgctccaagccccgcttgtcatagtgtcctcacccccgctgctggccccaagctgtatcctggtctttgtggtaaagagtctatcttgctgattcaccctgatcagacctctggcctgggaagtgtcacttctaatgagcaagagatggactgagattcctcagcggggcttgaaagaatgaaggaacgccagttaaaggccattcacactttaaatagccattcagaccatgaccatggctcccaagggactaatcctacattgatgtgtgtgcagacccctttcaaggccagtgacccatgcaaggctggtggtgatgggatccgacctctggaaacctgaacctgtttggctcagaacaatgggtcattctgaagttagcccttgcaacagactctttctccaaacccatgagcacaagaataccttatatctcttgaatcttggtgaccaccatgctgaatactctggggcaattcagaaagcagtatacctataccagccatgaaaattacaagtgtaacgatgcagacggcctggccactggaaataacgtacaccagccatgtcttcattccgctgtcaataaggctcaaaggactggctagaaggaagagtgtggaggaggacacacttaaacttatgtgatgagcacattggctcctgcaggattccaggctcacttctcatgctggtgtgactttgggtgagtcacaccactgcttttctgagcagtagggagaatgtcacccttgtaacatcatgggggcccagaaactgtctttgctttgcttcagttcttcccaccattaaagctctgaactaaataattgctgctctgtgtgtgtgtgtgtgtgtgtgtgtgtgtgtgtgtggtgtgtagtatatgtggtgtgtgtgtgtggtgtgtatgtgtgtgtggtgtgtgtgtatgtgtgtggtgagtgtggttgtatatgtggtatgtgtgtgtgtgttatgtgtatggtgtgtgtgtatgtgtgtggtgtgtgcagggtgtgtatgtgtgtgtgtgtgtgtggtgtgtatgtgtgtgtgtgtggtgtggttgtgtgtgtgatgtgtggttgtgtgtgtggtgtgtgattgtgtgtgtgtggtatgtggtgtgtgtggtatgtggttgtgtggtgtgtgtgcagttgtgtgtgtatgtggttgtgtgtggtgtgtgtgtgtgtgtgtgtgtgtgtgtgtgtgtgtgtgtgtgtgtctgtgtgtgtgtgtgtgtgaagttcaaatggaatgggtcatcgttctccaagcactgcctctttgtcactgtggctcttattccctgggaatcccatcgagtctgcacgactggaaagacctaatcttatgtgtgaacaagttgctgtggaaatcccctgcacttggcactccttgcttgacaaagcttgggatggacgtgattgggagaggaacttgggtacctcagtcttgggtttgaatcacttcttcccacctaaatgtgaactcaatagaacaaggccatttctctagagcaatcaggtggaaatggtcacctcaggtcagatagttgcaggtctacattgttgcgggcattgttgcatgtggaaacatctgggggggatgacgacactggtttttaactagatattaggcactgtttcaatacagcctttcctacactttgtcctttcagtaggaattgcttaccttatgagaaaccttagtggagaaccccaaagtatccctgcctccccgtagtgtggagcagagggagaagagacctggaacacactgacattcaacaaaagcctgacaacagggctgtctcctttatgccagaggccatgctaaaagcatcggcatttttaccttcccagcacagtgtcagtcctgccatgaagggacctgctgtcagagggtcaccgccactgagcattatgccacccctgtgacctgctaacctgcttggcccccttgcctgctctgctcctggctgaagaaaatgggccctgccttagagcctgaggaggacaaagacatttatccatttggaacacggttcccttgcccatctcttccaacacacaccacttatctttattcaccagataacagctttccctacagagataccagaaggcacagtcaaggaggcagagggacagcatgtctgcaaaacagccaaggagacagcagtttccatctaaagagatacacagatgtcccttaagcaaatgacaatttgtcatagatagtttgcggacagctttgaacaacctctcgtaagaactccatgtagcctacagggacatgtcactgtttagtttgtccttctcctgactagactaaatacccagtgcaaaagaaatcttaaagtgaactgtagtagggcttcggaatggctcagtcaggaaaatgcctgccatgcaaacatgagggcctgagtttgttccccaggacccacgtaatgaaaccaagcctggtggcatgcacctgtaatcccagcaagaaggggtggcagcagtcagggcttgctgaccagatagcttagctaaatggatgaacaccgatttagtgagagaccctctctctaaacaaacaaacagtggaaagcaactgagggacacacccaagattagcgctggcctttacattagcaagcatacatgtgcacacacacacacagagagccctagccatctctaaacagagtcgctttgagacacaccacgttctcagattcatgagcttagcaagaagccctggtttccaggccctcctccagccaacccagagcagaggacccctgagctcaggtgcaagaggcgccctgctctgagacacttgcgaaactcttacatcattttaacacgttaggtgccctttcctaactgatggttcttgtgtgttacaaagcactctgtctaatttgctttatagaactttgtgatactctggataaagcttgcgggggaccttacctggggggaccttggcagattccatggcagacaagggtggcttaggcggagggacaaacacgccaggcagacagagcttaagtgagaagttttattagaaaggggaggaggggaggaaagagaaaagcggtgaagacacacagagaccgagacacagagacagagagacacagagacagagagacacagagaccgcgagaggacagagggaagagggagcccagggccacagcaggaaaggtagagggacagagagggcagaaagagagctggaaaaagagaaggaaaaagagcttaagtgggcctaggcctttcttttaaaaaggtcctttatacctggactgaccagagtactgcctgagtgcattctgccaggtgacaggggcaggccagcataatgcctggatctttacagtatgaactacagcttggcataaatatgcaataaaggacacagtgaattggtctacaagttcgaccatatatataaaattataaagacctagcagtgtgagctttagtactgaacaaaccaccaggtctagtaaagtcatgtctagatctcagtttcttgaggagctctagggaaactcattccccaagtaggtgcagttggggttagagccagagccctcctccagcttacaatgctgcacatttcccaagggaaatctttttcttttctagaaaaataaattatgttctgcctggctctcccatgcttgccagccacagggaagagagacgaggaggcaaaggcagtggagggctgtgtccagccgtctccatggacagactctggcttctgacatccactgttgattttctgtaactgtcctagtaaaagagagcagatggaggaccagattagaccggccagcccaaccctatcagtcattttatgagacttctgtgatttctgccaggctagcaagaagagtgatctggagagagaaaacaagggagacagaaactcagaggcactgggccaggtcgtttttgacctggaaaaagcctgagcagagttgggatgtcagaggtggacagacagacagacagatgcacttcagctcccatcataagttttccactaccaggcaagtcattcgcctatgcatttgttccctcgtctgaaaaaggatgctaatcacatattcctttcagaattattacaggggttaaaaaatgcatgtgaagtgtgggttgtgaaagttggctatctcaagggactttggagtacggaaactaatgataaaataatgttctgtaacaaataacgcctttgcaagtcagttaggagaggaaaatagggagggaagcagcctgccaaattccattcaatctcagtttggctccatacacatatattaagtacctaccatggaccagactatgctatcaccataactcagctcctgaagccagaaagatctgggtttaaatcccatctctaccatttcccagaggtgtggctttaggaaatgatagaccctctgatgtgacagtatatctctctgagtaatgtttatggcacttgcctcagaggtaaatgagaggaataagtgaattaataataatgactctgccatgctgcgagggctcaatacattacacttaatatcatctttgtcattggcatcaccacaactaccgctaccaactgtgtatcacataaagagttaaagaaggaattagatgggctcagttgtagctcattggtggaacctggtctagcatgcacaaacacccagcatgaaaaaacaaacaaacaaacaaaaacatggggtaagatacattccctgatatcaggcaccttccggttttgtaggtccccggattttagagagggtcgtgggatcctgtggctaagtattgaacatcatcagcaaacatggaggtctttaaagtataaagaaggaatggataatagtagaattgactcgcctactgcacctaacaaaacgtaatagggctgttctcatgggattctatggcctgtcaagaattccagattcggggctggagagatggccaagcaaataaaaccacttgccattcataccgaaggccagagttcagttcccagcacccatgacaggtggctcacaattgcctacaactccagctcctagagacacagcaccctcttctggcctcctcaagcaccatacacacatgcgcatatacacatagacctacacataaacaaataaaagtaaattttgagccaggaagtggaggtgcacaccattaatcccagtatttgggaggcagagacaactggatctctgactttgaggccagcctggtctatagggtgagttctgagagccaggactacagagaaaccctgtttcaaaaaaaaaatgaaaacaaaagtaaataaataattgatgaatgaataaataaataagttttggaccagagagatggttcagtggttcagagcactggctgctcttccagaggcccctggttggattctcagcgcccacagggggctcacaaccacccataactccagtctcagagcatctgtcacacgcttctagaccctgcaggtaccagggatgggcaaggtggacagaaaaaacacccatacacatacatttaaaaataactaaaatttaaaagtattttataaaaaagttaatttggtgaacaaatattttgacatcagtatctagtgcactgttcatttcagggctaacgggactattagacacaggacagcaaaggtgacaaatgtgacctcagtgatgagaacacacgtgcactggacaggatgaggtatagagggccagcttcaaagaagggacccttccctgagtctctcaagacaaatccagatggctgcacctggttaaacgtgagccttgatacgacagactggtcctgacccttagggacctaggcaatttaggccgctattcccagacagaaatgagccgtcacagcccagagagtgcattgtaggttctcacaaggaatgtgaactactctgtcaggaggcaataaggaagatgcaggagcacgaatggataatgtttgcactgactgcagtgttgaaagggacgctgtgtgacacaaacagccggtacagacaaatagacatgagtagctcccagaatgctttgcgttccctaccgaaactcttaggtagatccaagagcatggtgaatgggagttactgagggcaggtgggctattacaaggtgaacacctgtaaactcccatcatctggatcaaactcattacagaaaaagatctagtatctctcaaggtccacagaggaggagacagaggacaggtgacatttgttggccgacatcatagataagttatagagagccagggagatagctcagcaggtaaagtcacaagtcagcaagcctgacacctgagtgatttcagtcccacatggtagaaagggagaaccaacccctgaatctacacacacacacacacacacacacacacacacacacacacacaaacagacacctgctaaaataaaaagattatggtcagaatttaaacacggtgttcagatttaaatgttacctctccagtaaagggataaaaatgacaagttgattcttcagatatttaactctcctcagaactgtgattttgagggaaataaattttggattttggtgaattgtgacacaacttttctcagaagccgcatttcaagttcagaaagtatacagtaatcaaactcccctccttgagctaggcatggtgtcccaatcctgtagctcctcaagtgaggaagaagaggaggcttccccaagcaccccctggaccccacaaaacaaaacagaattcacaggaaccacctgaagtcactcaggagcacttcatgctgtggccggcagatggcagagggtgacaagagaacgagggagcctcagtcaccgacccccacccaccgccatcctgcagctctcaagtagaaaatgcatttgcctcagtactatttgtttaaagtcacgcttgaccccgaaaggtggtttctaggaagaggcctttctgctcaattcttttgtcaccatttccatatcacaccaggagaccgggcatcctccctgtactccaccctgatgctctgaccagacgtctcctcaggtcaccagactattttagctgaggggatgcttggggtgtaaaagtgatgactgaagcaaaggatttggtagtgtacaaagaggtcagttcctgttgacgttgggaaaacaaaacaaaacaaacaaacaaacaaaaacaaccaaaataaccctggataattctccctaagaaggcggattttaagaataccttctgctcaggatgtggccctttgggagcaatggggccctgctcaggtcagttttctgttactttaataaacatcatgaccaaaaaacaacttggggcaaaagggtttattttattttacacttccagatcacagttcttccaggcaggacccggaggcaagaactgtggcagaggccatggaagagcactgcttactggtttacccattggctcacattaagttaccttccttacatagcccctgcctacctgcctagggatggtaccacccacagtgggcttggtccttcgacatcaattagcaatcaagaaaatgtcccacaggtgtctccacaggacaatctgatgcacacaattcttctgttgaggccccatcttcccaggtgactctgggttgtgtcaaggtgacataaaaactaaccaaccccagctagccagaagccacagatttttaaagggtcacatgaatggcctggctagaggctttctgggactctcaaacttctgaaacttcaggagccaaaactcaacaatcctcattcctgtcaactgtctcacctcccaggctcccacagaatagcccattgtaatggctttgagatagcttttccagaccaaattcctaacacttccacagtcctcccccaaacaatgtgatcaggactgtcacagccataacctggtctttagtacccatttctgtcatagtttgctttcatttgctgtgataaacatggtgaccaaaagcaatttggaaaggaaagggtttatttggcttacccatctccatcacactccatcagggcagaaactcaagcagaagctgaggcaggaatcgtggaggacgctgctcactggctcttctccttggcttgctcagcttgctttcttatacaacccaggaccactgcctggggggagcagcactcatagttggctgagccaccccaccacagtcatctgtaaagaaaacgatccgcagattggcacacaggtaatccctcaaataaggtcccctcttccagtgatctaacttgtgtcagctttacaaaaactaaccagcatactcagtttgttttgggttgtttggttgctattgctattgctgagttttgttttgttttgttttggagttttggtaagttttatttatgtttttattttacttacttattcattcatttgtttatttatttgacacaagttctcaccctaaattccaaagccattccttgcccctgggaaatctctatgtaactcaagccagccttgaacttgtctgagcttcccagggctgatataacaggtgtacatgaccacgctctacaggctcacggttttgggggttccagtcccaggtcaggtggtcccgttacttatggaccagtacaattctgtaccttggagcctcatgtgaccaggagataaagacagggagccactgaggtcccccagtcccttttaagggccccacaatgacctgtgcattagggaccacctcttaaatggcccacttcctccaagtaaccccatattgaggatgagggctttaatccaagggcctttgggggacactttagattcaaactgcagcaacttaattttgcgctttttaacttcaaaagaagataggcatctgggaaccagagaagccagggctccttgcctgtcagagaacacgctctgtgtttgggctatggcagtgaaatgtgatgagtctccaaagatcagaccataggaacttaactccaccctacctggagtgttcactaggatgtctgatgtagtgtggggacgagctggcaagcgcgtgcttctgtctgctgaaaaaattctaatccttgaatttgattttgtaaacaagaccacaggatgacggtgagtgttaaatgaattcatgcacatgaagggcagagcccctgttaaatgccagctgtgccagaatccaacacagaaagaaacatttttgagatctggggagttattaaatgatatttgctatttgctctatttcactgagaaaaaattattgaatatcaactatgtgccaggccctgggccaggcatgggatgcaacaagattgtgctgacccctgtctgccctcaggagaattccctccttgagtatttggttagccagggcttcccgcagtgtaggtatttgtaacaggagttttaaagtgaaagtgtgaccccatcagcccctacaggccagtctcccagcacaccaattaaagatatgagtgatggtggatgccgaggatggaaatctaatcgatatttggagacatgaggaacagacagaacaatccagtggccccaagctgtcttcgtggtactgacatgggtttggagttaaacagaggaagagctgggacagggacaagaagtgttcatgactgagcagtcctgatgaagaggcggcctgggtcagctctgcttcttcaaaggatttgaaaagtccttgttgcagccatcacttggagggaacgtggtccctgggaggtggttactcccatccaagtgctacctcaccattgtggaaaatcgtctgcctataatgtggtgtgtgctgccaggctcttcgggtcctggtatccaaggtgacagcagagttaggataaggacttggttttcttttttctttttggtttttcgagacagggtttcgctgtgtagctttggagtctatcctggcactcgctctggcctggaactcaacagagatccgcctgggattaaaggcgtgcttcaccaacgcccagctatgacttggctttcaatcatcggtcttgaaggggagtgaagtaggtttagctgacagatatcccttagtaggcagcacacctgtgaggagtcaagcaggactctgacttggtatagggaacaggcacaaattgaaggtagagatgccaggctttcagcctgctttgtgttaccctatgagcccaagcagagagtccatgcttgttagtaaaaagcagagtctaagtgcctgaaaagggttcatgcgcgtgcaagtgtgcatgagtgtgcgtgcctgtgtgtgtgtatgtatgtcttctaaaattaaatgtataaaataatggaaacacaacaattacaggagttcactgaaggaaccggcttcccttttggcagccataatggtctaacatgtgcttctatgaccttgacctagtcactagaaagtcagatgcctgccttgtgacaaggaaccaatcagaagttagctggtggtgctatgctttacggctctgggtgtgttttacggacaagcgcacagcaatgacgtagagagcatagcaaccaccctgggagggcctatgggccataacaaccagttgaccaatcaacacagggcaagccctccaagcctggaggcacaccaatcgtgagcctgtgtgtacccctagacactccccttacactgccctataaagatctatgcgcagcagcttcaagccgtcttttctagccgtccgccatggcgggtgggtaaaagacccgagctaacatagggttagctcgttaaattacaataaagcctcgtgcagtttgcagcaagctctcgaatccgcctggtgattggggtgacctcgaacctggcctgggaccccggatacttgagttttcgggggtctaacacacaatagcatgagagttgtccacagacagcagtcttccagagaggcaacaccagtgaaataacgtgccgcatcgttgatgggcttcatttcatctgtcacacggcactggaggccaggacagcacaggaaaagtccacactttgggtgcacactgggaccaggtacagtatcccctacaagtgaaataggtaagtgttcaccacacccagaatcaagcttacacaggtcctcctgtgataatatccctgctaaaagggacttgaagctatgaagacggaatgagagaaaggaggcagcctgggatgaaactgcaacgtaaccttggctagcagcttcccgactccaggcttgaaggcctctcaccacccagtaagatcttaagccagaacagaaatcaaacattcatgacaatccactgacaatgggtttgttgagcgagttccctgtctaatcattttataagtttctttgaaatctcccagtcaaggctggggaggtggctcagtgggtaagacagtttactctgcatgcatgatgacctgagtttcatcattggcacatgtgcaaaatgccaggcactgctgaatgtgtctgtaaccctatcattgtggaatggagacaggcggctcaatggctggccagcctagcaaatggaaagcttgaagctcaatgggagactctgtctcctctgtctcaaggcagataaggtagatagcaatagaggaacacacacacacacacacacacacgcacgcacgcacgcacgcacgcacgcacgcacgcacgcacagagacaaatctgctattcacctagttggtcaatttgttttgagacagagtttcatgtagcccaggctaacctcaaactcctcatcctcctgctccttcctctcaagtgcggaataacatgcttgtaccccctacccaactttcattcacctttatcctccattcatggggcatagacggcaatgcagtgacttacagggtcgacaatccccaaactatctgtacatattgaagacaaaaacggagcaaatagactacaaagcctcagtctgatgctcttggcctacagaagcagttagagccctcccgtgctgggcggaggtgctggtgcgaggcaggctgcgctgtgtttgtgaagagaagggcacggagctgaactgcagccacctgagacctagagacccagactcaagaggactgtggttcggagacgccctggtgctgatccctcaggactggcatattccattggctccctatgaggttgcctttgactaagagatcttttgggaaacgattggacttgttcttcatctgctgcctttttttttttttttttttttttttaatcttagaaataagccaaccccacatcacttcataccaaagaccctgagtgctggtggctggtgaaggtaaccagcagggaatgaatgggagagtcacgggtcatcattaaagaataattttcatgacagcttctggtgctcatttgtagaaaatttgaccagctcttaaaacttttcagttacatcccacacggttctatccagatgtctatttcttaccaattttaagactaagtgaataggttttggggtgagattgagtatattctatttacgtttgtttttggtaaacaagatgcctcagacacgcctccactcaataaccataaccctttctgtcttacctcctatgttgaggtcaatgacccctaaaaaacattctgaagaactcccgcttaaattcagcaattgccacactgaaccttcatcctctggatttcccctgcatgtctgcaggtcctttcccatcatcctctcagtcctgtctcccccagtcatcaatacgtgcctcagcaggcaatccttcctcagggcaggtcagacaggaaaggcttccatcaactcagcaggaatctgggtggacacatcgctcacctccttccttggccattgctcacctccttccttggccattgctcacctccttccttggccaccgctacccacatcatggaaaattcagccttgctgtggtgagagataatgttgagtttgttatggatgagtcattggagggaaagccatgggaggctggagagaattcttatgaacaggatgtcactatgaaagccagcgagactgcacccttgtgtgggaaaggttcactagcagagaaagccactcagcactctgagaatctagtgatctccctgaggaatacaagaagtttggctataaacttgaaccctaaggcttacacttgcaggaagccggctcagttctgctgtgattcacaataatgattaagcatcacttagggccagtgatattgttaaattaatggaaaggtaactgtgtgtgtgtgtgtctgtgtgtttctgagtctgtgttggtgtgcacacacatgtcacagcacatgtgtggaggtcagaggacaacctggagtttcagtcctttttgagtagagtgctttgttattcagctttgtgtatatcagactcatgggcctatgaatgtggtgattctcctgtctctgcctcccaccttcctgcaggggtgctgctgcatagacaccttcctgaaggagtgctgtcatatagacgccttcctgctggactgctgcatagatgccttcctgcaggggtgctgttgtatagacgccttcctgcaggagagctgttgtatagatgccttcctgcaggagtgtggctgtacagacactcacttttgtacctgcagaggtgcggctatacagatgtgtacttttgtgcctggcttcacaggggtgcggggaatccaagcttgggtccttatgctggtgtcctcaagcactttatccactgagtcatctccttaatccaagataaattttaaaaaattgtttgcactgtgagaattaagaaactttagcctattccaagaaggagtctgcatctggaaaaaaaaagtcaccaaggaaactttctgcaggactgctgttgtatagacaccttcctgcaggagtgctgtttcctaaaacttgaagattctatgttcaagttgtttcctaaacttgaagattctatgtgtcctgagaaacaggccacaaggaactcacagcagtagaagaaaaccagacacatgacaataaattcacaaggactaagagaagatctaaaatttattaataatgcaaatattaaaatcagtttcttttaaagggtcaagaatcaatgtcccaggagaatatagctgcaatgaataaaaattttaaagaaaaaaaaatgcttccaacatgaattctctaccaggaaaaactaccagacagacatgaggataaaaactatttgaacattcaaggtctcaacgttttccttccatgctctttccttacgaagtgtctgtcataagacgaaggaaaagtggatcaagggaaaaagtggtatgactttaaaagcgcatccgtagtcttagaacattccagaatgtctgttctgctcccatccagactggacatggtggggggagcgttgggggggtaaaaaagatcaattatgatattttggggtgcaaacctcagctcaattccaggagcctgaatctcacattgtctttcagatgctggctaattaccacctgatggcttggcctccgtggagaatgtctcctagtttgcataacaacagacctaggccctgggtgggcccacacctattctgagggcttgcatgtgtgcctaggactggtgagaggctggtgaagatgtgcagttttaggggtgcctctagtattaaatgaaaaattagatatcagctttatacaacaaaccatctattcacccgaggtagaaggcacagacagatcaaaggattccattcaagtccagcccgatgaagcctcctcctcctcttcactctcttcctgttgctccttcctcacatttctttactctcttgcctcctgccctctcactgtcccctccatcttccctctcttctctgtcttctccattagaagccacaaaacctgacagagatgctgcctgggcatttactgctcttcaatcctgccctgtgagccttgtccctgtagccctgacctctgactgccgctgtcaatgtgtggtcggcttcactctgaacgctaactcaacactaaggaggagccgtcttagctgtgtgcttcttcgtcattctccattgccccggcttgggttcttcagtgctctgtgtgttcagttcccagctctgtccactttacaagaggcccaggggtcttccttatggagagtcactctacagttgagcaagctatggggtgtggtaggggacaccatgccaggaccggtctgtctagccacctgctttgccgttgcctggagctgcagacttggttcagattctgtcacctgggctgagtcaagtgcccttcacacttgctgatggacctcttttaattaatcttccaggaagcaactcctgtcacttccctgaccttaattcctccctctcatggcacacagctgacttgtcacctctttggaagtctttccttcgggtcattttcagatttgaactgaagataaaagcatagctctgacaggattttcccacttggactactttattgacaggtagcaaaagcaagatggaggcgaccctttggggttctgaggcagtgacagtgagaggagccaccagattcttaacaactgtcacttgggacaggtgtccccattgttactgtaggggccagaggagctgtccgccatcattgaccccttagttttctctagagcccttgactccgggaaaggttcgccccttccttgatcaatcatctcttcctcatctttcctttattcttcttgtatccctcgttgtcatggcagtcatagtctccaatccctcatcatttcacattcttctttcaatggctgagttttccttgctgtgccaatatttcttccattccatcttttaaattattagcatggatctttctggtcacaggtcacagtttctatttggaaagtctgttttggagtggtagcagtagaactccagttaccaggtgtctcccaggcttctgtactccacccgattcggttggacactcacctgttcctattcagttggaagctctcttgagacttttttaaaaactgtcttttcttgccctgttgggcctcactcagttgttgggatacccatggatcccaggtccccgtctttaatagctcaagtgcctggcagccactgaaactccctggctcgggactactaggtttagagttgagaatgaagggggagtgggatgaaggcaggccgttcttggattgcaactctgtgcaagaaagccacagagttgaacatttaagtcacattacactgtagtcccaaaaatctcaaaaggggtggggaggtgactttgagtgttgtgttctatacagcactggaatgacagcctttaaagcactactgtggagtgagtggggccagtttctcctccgtgaatccaagccatccttcctgaattcccatgtagcaagcatgtaccctagtttgcttttctgttgctgtagtaaaacatcgttactaaaacgtaggatttatttcagcttacattttatagtctatcactaagggaagccagagcagggacttagggcagggacctggaggtggggactgaagtagagaccacggaggaagctcttactgggctttttgtctgtctgtctgtctgtttacttgacttagtttgcttttttatacatctcaggatgacctactgaggagcagcactaacaggactgggcagggccctcctacatctgtttttaatcaagaaaaagccccacagacttgtctacagtccagtctgatggagccatttcctcaactgaggttccctcttcacacatggctttatcaagttgacaaaaacaaaaacctaaccagctcagcatgcattaaaacaagtgtatgctataagcctgcctcatccttatgattgccacgtcctccaatccttgtccacgttttctctttgactgcagaaatagcaatggtaggcaggggtgacgctggagagatggctcagtgattaagagcacctgctgtgcaatcatgaagccctaagttcagatccaagcactcaggtaacaagccggcttgaggtccaaaggatctgatgccctcttctggcttctgtttgtacacacacacacacacacacacacacacacaccacagattaaataaaataaaccttaccaaaaaaaaaagaaagaaagaaagaaagatagatagaaagaaagaaagaaagaaagaaagaaagaaagaaagaaagaaatagcaacagaagacgaaagctcttgggaaaattatggagtgtgtgtagttgccagagtgttacagaaaaatgctgcagctgcagacagggctatctgcattttctagaagacactgagatttcatctgtatagcacaaatcatagtcagtgagatgggggtgcacccccaaaggcacagcaatgccagatgcacacagtgtggcactggggtgttggggaaggtgactgatacacacagagattggaggaccctcactagtcaggcaaagtcactttcttgtgctaaggcaagactggccagtctgatttgctcccttgccctttcttcattcagtctcaatatccatctccccctccttcccttattcagcatatgtcactccattttggtttggtccactgggcatgagtttagctccggggaatagtctctgtgaggtgagttcattcaacactactttaggacactgggcaagctacgttccctctatgaacttaactccctcatctttaaaatggcaattaatataatataatagctttgccattttgtgatgatgacgtgggagacagacattttagacacagtaattcctgacatcagttctccacacatgagaggagactatgcccccctttataactactcagactgcatttgcttgaatttacaaacagacttttcaattttagtatttaatcttcaacagactagttacaaaatatgggggatggctctctttcttgagttacaaaatgacaactctctgaaattggcgtcagtgatgctggaattttctctgccaggaataaaaatagagtgaaattcgcaccctcatcagctgagttcaggccccagagagactggcaactgttagcacatcattgtggggacaccaagtgcctggcataattcgaggtctaattgtaggaccttaacatcactggcctttttggcaggggtggctcctagtgcagatcaacgaggacaaatagcttggacatattagcacttgacttcacagccaagtgtgctcacaggacacctgcccagcgctaagcatggagcatcaggaggaatccatagaagtgtaagaggcagaatgttcctttgaaaagtcaaccatctccaagacttagtgacttctacattatttgctttaaggtggtggtgtggatctggacaaaataagacacagaacctcttcacttcagagtctaaggatcaggaaggtatatagttcacgcaaaactcatagtaagtaaaggaaaatagttgggtgtgttggatcatgtctgtaatctcaatgctgtggaagataaggcgagagcattgtgagttcaaggccagtctggcctacacattgagtttgaagccagcctagggtacataataagcttgtggtcagtctgggatagttagtgaggctttgtgtcaaaaaatggggagcagaatggataaatgtcccaatggttaagagcatttgctgctcttacagatgacctagctttggttcccagcaccccaagcaggcatgtggtgcacagacaaatggaggcaaggaattttatacttattgaataaatagggagaataattttcaaatgctagtttctgaatgcagatttaataataaagtccttccaaatcctgtaacttcctttgattatatcgggcaagctgaatggggcatgtgacccggtttttatacatggtccccttttagcaaacacacaggtgcagaaaggatccccaggagaaagcatgagagtatgcaggttgactggcgacacaatgacgcaggccacgtacagaccacaggtggtggctttggtggctcccttcacttctacagtgcaggtgcaagatccctcacaccatggctctggccatgcttgagggcctttcaagaagctcctgggaagaaataccctgaaagggagatctggtctaccaggatttgggaaggaaaaggggttcccttatccccatactaatactaacaacctgataaatattcacagattatttgtttaaaaagcacagtgaagaacccgatatggggctattcctgcttccagggctagtctgccccaaaatccctctcgagcatgtaggttatttgcaattttctgctcacactgtctgtctcctaactgaattctttccctgaagaaaagaactaagaagtcttcacccgttaacagcggaagcagacagtccgtgtcagcagcttctcttacttgtttcacgatggggcctgttttctcaggtggctccattggtatgactttctttcagcaagaggtcagttctaggctcctttacaaaaatgtccagagagactgtagggggaaaaatccctggagacagacggccagagaagctactcacataaaacctcctcctaagggtgacagccctggtctggatttcacagtccctggattctccagagtgggccctgaggcaagctgttagcttcccaatggtttcattctcatggggggtagttactactgcacctacatctgggctattttaagagtttaacttttgcatctatggtgctgtgctagtaatagctcatgcctgcagtgagaagaagaagaaagaacaaacacctttagttcagttccatcaaactgatgtccaactatgaaataatttacttttatttaaaagagacgttggggctggagagacggatttgtggtagagcactcgtgttcatgccggacaacccaaacctgtctcctggacttgtgtgctgagggagagcccacgcccacaccaagcatgccatgacgacatatccacagcttctcctgatagcagagacagagctgtgccttaactcctctgccttctgtgtaaaattcccagtaacttcctgttctcagtcacacacagcacgttttccctcccctcttcctccgccactgtcagaactctgctcacacatttcctttttgcatcgagattaagttgtcgttagacaccttgctatagactaactcttgtcaaacccccggttcacacactgtctggagagacaggctccttaagacagcagatgagaggaaaagagtacagaagagagggccctggtccaacaaggttaatggcctcagaagagggtgaggcaccaactgtgtacacacggaagaccatacgaggccacagagagacagtggtcaaaggagaggccccaccagaaaacagtccttccagcatcactttgatgttggactttcaggtcgcagaattgcaagaacacagatttctcctgctttaatcagccagtcatcgtggctcatcatgagcgctctaacagtcaaacacagatgcttccaacaaactgaactctcggctcccaagatgccaagagtgaaaccactatcgctagtgaggagtgaagccatgggaacctcaactgtccctgtctgaacgggaagtgttttaaaactagagtctcataaagagagcttcggggatggctcagagggtaaaagcgcttgtcacacaaacttgagaccctgagttcaaatccccagaaccagtgtaaaatcaagacccatagtgtcagtgtcagcaatctcagcaccactacaaggaggcagaagcagagacaggggaatacccaggatcatattctgccagcctggcacacacacaccagcaagccagagaccctgcttcaaacaaggaggaaagggaggatgggccccagctaccgctcttgtttccacacaactaacatgggcacctatagtcctatgcatgcatgtgcacgcacacatgcaatttttgcataagggagaaagaaagacaactgaatgcatgtgtcatctactatttaaactatcttcatgacaaatgcgaaagcctgcctgtcacgccagagtgacaacaaggagttctttggcatcacatttgctgttgaagatgtgagttctggggaataatgcttgaggtttcccaagtgttcttcatttaagcaaattagtcagagggtcccagtcagagcaaatccatcattttagctgtgggtctgtgaatatggccatgctgaggtctgagataaatctctatgccagaaaacctgtcatttgaagtgtaataaaaataacaatcagggctggcctcggggcaacgagaacattgtgctgctttgcaatgcagaagaaaccgacttccgctcatcacaggccaacatgacaacctggtatctacaaaacatctggttggcgccagcataaacatcttctgttctctgggaaaattatttttgcacaccatggcttgagaaaggtcattctcatgggccccaaaaacaccttctagagatggcctggaagtgtcactaagtgaggtggggacagataaggccctgtctctcactgtgggtaggcagctctacttagatgtggtgatggctgctgtcaacacatccttcctctggctcatctaaagacatctgtgggaccattggtggaggagaagaagttggcatggatgcaacgcagataaaattgaagagatgaggtaaagtgagaggaaacatctggaggccctggcaagtcggcctcaggctcatcgcccaaagtggctggtgttcgattcctcttcactgttggtttccaatctggtgtttcctgatccttgcagatttctctaaaaacaagtcagatggagcaaatactgccatttgcttggaagatgcacaagatgccctcttggatgtggggacctcatttcagtgattggcaccttgttgaggtttttacttggtggtgcctcaagctgacccagcacttaaacccagtgggagttgtcagtctcctcttgtcacttcttctgcctgatcgcttctctgagacaacaccttagactggccctcacaggcttgtttgtcttttacttctaaacaacagtgcagttgtctggaatgttcagagaacatacagggcatgcccttatatagtctttaattgtaggcagttgcacggcagatttccagggtgaagggctgtgttgtcaactatggataaaatgccacaaaataggcctctggatcttgtttgctggactttactgaagcctctctcattgagtagcaaccctgtgcttccttctctcccctcagcttcagccactaccatcccactgtgtgtgtgtgtgtgtgtgtgtgtgtgtgtgtgtgtgtgtgtgtgtgtgtgtgtgtgtgtgtgtgttgtatccctctgtgatgtaagtagtggttccttcctgaaaagcaatgaactatccagtgtgctctctcaggtagtatatttttaaatcaagcaggaaattttccaactgagagtaaaaagcaataaaaaaataccaacataaatacagtgttatttctattccctaggtaaaatgaagattttaatatacgtgtggttattttctccaattttcttgagcatttctgacttatcctaggaacataatctaatcctaggctgatttccctaagggattagtcagcatttattgtaatgacttttaaatctttggactcataaaatcttacatctctcaatttaaatcaaatcttgatttcctggaaatcctggttaatggcaacaatcccttaagtctctaaagggtagctggtaacatatgaacatatttgaagcaggtaaactattgggaaccacagcttttctacatgggaaggcaatacaattttaactctgctttcccatggtcctggtttgccttctgttactgtgacagacaccatgcccaaaagcaacttgatgaagagagggtttatttcagcttccaggatatagcccaccactgagggacgctaaggtaggaggctgatgcaaagaccacagaggaaagctgcttgttggcttatgctcagtttgcattttttatacagctcaggccaagttacctaaggatagcaccacccatggaaggctgggcccttctacgtcaaccagaaatcaagaaaatgccccatagacattgccataagccaatgtgaagggggcaatgttttaaagatttattttatgggccgggcggtggtggcacatgcctttaatcccagcactcgggaagcagaggcaggcggatctctgtgagttcgagaccagcctggtctacaagagctagttccaggacagcctccaaagccacagggaaaccctgtctcaaaaaaaaaaaaaatttttgttttatgtgtatgagtatactgactgcacacatatatgttcatgtgtccagtgtgaatggagttggatctcctggaagtacagttctgggtgcttttgagctaccatgtatgagctgttacaagccctggtccttggcaagagcaaaagtgttcttaactgctgaatcatctttccaggccatgatggaggcaatgtttcaaccgagggtccctcttcctaggtatttcaagttgacaacaaagattagcttaccacaccattttaatttagtaagcaagagtaaactttgaagttgatcaccaaatactgattgagcactttttgttttatgatacttccatatgaatagaatgacttactcatttcagtgaatcttcaattatttgggttttccctcttcataatgtatttatattccttcattcataattgctcttcggtgtcccttcctccacttgtattttgtataaaaaaaaaaaggtcagggtgaataaaaaacatagtaaaatatacaatgtacacccctacacagatagtgtgtatcagatgcatgtgttggctttgcgtagagttccaatgtaagcgtaaaaactggtgaggactacattgtcttaaatagataatcttcccccaccctgcccctctctctctccttcctgggctgggaaggagactgacttatcactgacttatccctgcccttctgtgcagcaaactgccagtgctaaagacctgaacctcctctatggcatcacaagggaccttttataacattagtcaagcgctgcggagtaaatccatttgccaccgcattcttatcaacctggggtctccctgggtgaatccctctaaggggatctgaatctgtcacacctcatcatatttctctgctctggaaggggataaggagaggagattgcagagaacacagtccctgtggcttgtgaagtagccccaaatttactctggttgttggtagaagcatggaatgtgagaagaaagtaaaaaaaaaggataaagatgtaaataaataagtagcaataaagtaaaaaagcctttgtgtgagcgctgggaattccatgaagacatgacaagaagagaagaaaagagagaaacgaaggagttgaagggcccctggacagagctctggctggaccgtggttggtggtgtctagaggtgagtgcacggaaggccacaaaggcaggcctgcagggcttccttcatggaccaaacacacagcccgttgacttccttgaaatgagaattctttggggcaataattctaacaccacttctttaaaaatcccattttaagacctgtaacactctcctctgtgcactgttaaactattttaagtggcagttgtaccaagaaaacacttaaagtaacgtcacaaacctagaaggaccgtttacagtctatgtggccaactgcagacaccataggatgagcagaacacgggtgtacagactcacaggcagcatggcctagttatcatccactctctagattcacaggcgccttttgaccttgtgacagtaccaagccccataacagtatcacttcccaaaccaacctacgtatggttctccaaaggctagtcaccctgacgtcaatggccggccttaaagacagcaccggagagtgaaatggcccttgactgagaaactatgcttggttctgtgttttcattggaaacaggagtcagagtgctcaggagccacctggaagctcaaggtcagagtacatatcactcgtgggaattacccaagctgatcgttggacaagattgctctgaactctttgctttacacaccccatttcctcagcccttactactcaggactggagtgcagagatctgctcttcaaccatgcttccaggagattttaatgcagctcatctttacacagggaaatactgactaattctgtgtgtgtgtgtctgtgagtgtgtttgtgtgtgtctgtgtctatgtgtgtctgtatatgtgtgtgtttgtgtgtgtgtgtgtctatgtgtgtctgtatatgtgtgtttgtgtgtgtgtgtttgtgtgtgtgtctgtgtgtgtttgtgtgtctgtatatgtgtgtgtgtttgtgtgtgtctgtgtgtgtgtgtttgtgtgtgtctgtatatgtgtgtgtttgtgtgtgtgtgtttgtgtgtgtgtgtttgtgtgtgtgtgtgtgtgtttgtgtgtgtgtgtgtgtgtttgtgtttgtgtgtgtttgtgtgtgtttgtgtgtgtttgtgtgtgtttgcgtgtgtgtgtgtgtgtgtgtgtgtgtgtgtgtgtgtgtgtgtgtgtatgtgtgtgtgtatatgtgcctcaaaccttcctgatgctgtgatgtcaggcatgtgacacaatgtatttttaatgtcacatcataacatttaccacattttagtctttccatgtctagaaaatttaattattagaaataaaagtctttactaaaaacatgaaatcataaataataagtcagtttcaagaaatggatgcagatagaagattggtatataatagatggatggataaatttctaattgatagatgacagatagatatagatgatagccaactagatagagatatgggtgagagatagatgataggtcaatgatagatgatagatagatagatggaaagatagatggatggaaagatggatggatggatggatggatggatggatggatggatagacagacaacagacagatgtagaaaataagccactcagagtgccttcaatttgagatccatgtaattgtgtcatgactggtatttcctgcccttgtgttatcgattgagtaatatactttaaagcaggtagctgcattcataagagaaacagtatgaatgcccacacatgcaatcatgttaaacttaagctgacataaagtctgagtaccacagttgctctatttaatgagagaggaacaagccaatatgccctcaaaaagaccgctattctcagaggatcctgaaaaaagatatatatggaaaagcagtctgttggcgtcccttttgaatcctccagatccagtgtatttatacctttcgaggaagtgagaagtgggctgcagactcgagcaggtggctttgccttggagtcacattttaggctgctttggtcctggctgagcgctcagccgaagaagtggctggtgctctatacagaggaatgggagtaaggcggccttctcatcactacctccccgccacgcgggttctcagcgtatccaggtttccagtcacaatttatttaattggccctaatactacactgtttggagccgtaatgtgttaaaaaaaaaaaaaaaaccctacattatctttcattacaaactaagctttgaaaatatattttaattgaaagagaattacatcatttccccctctctcttctccctccacccacatcccagctacactcccttggacccccccccatcctccctcaagttaatagcctctttttctttgattattgtccttacaggtgcatgcattatgtacatagagatagatagattagatatagatatgtaacctggtaagtccattttttattataagtctgcatagagtttcagggctgagcactctgcattggataagcaataaggtggtcatcccagggagatgctagttctccttctccccaaccatccttagtgcccacagttccttgtctagggatgtgaccctgtgaaatattcccccttccatgtgaacatgcccactgacattgccattattctggtgttgttcatgcagccatttctaggagacattgtttcatacaagactttctgatcttccagtctgtctattccctcttcctcagtgctccttgagccatagatgaaggagctgtgatatagattcatccactggagctgggctgcccatgatctgttgattcctgcatgtgtgcagcatggtcttctgtgatcgtctccgcttgctgtggagaggggcttctttgcaagagggcatgggtacacttacccagggaaggtggctccatgtatctaagccattttttaaaagtgtctgcaccaaaatggagaatctgccgtctcttatgatggtctgaatcttctccttgatattgatggtgaatccatagatgtcctcatgttgccatgatgggatatgcatcaagggagacaaatctcttctcccaaagtattctgtgtggttttaggggccctctggtttgctagatcatcagtggctgcccctcccaccttcaggatcctagctgctctggaatgctaagtccacctagcttatatctggtggtatcagaaggcttgctggttaaaatcacagctccagagaataaagaagaaagctttggctcagttgctatcattggccatttgggtaaacgtcatgattctgtagttctcttctttctaaaagtggctgaaactaaggaattttgatatcttttccttggccctcttctcttcccttccctccccaccccccacccctctctttctctctctctctcacacacacacactgttggtaacagggacaaagtccaattgattgcttctgggaacaagagttcagcaaaccagatcacacaaaactgccaacatcttgtctctttggctccagctttctactctttatttctatatttaacatgagcttagaatcaggaatgtttccattaaataacttgaagaggaaacctcccttctcagttctgtgaacagttacttcatgaatagttacttccggcctcccaccttctgctctgtagcttcaccaggacactcacagtctgatggcttaaatatgtcactctgcccagaagtccagccttgtctgtggagtggacacaaacaaatgtgatcccaaacttgtttatttaagaaaggcagaagtcaccatctacttaactactgcagcaagactgggaaagctgccggctgagagtgacaagtggaactgtctgtgttagatgacaaggccaaagcccagggtgattagcaggtccagcccgctccctcccgtggctctgaattctgcacttcatccttcttccctcctgcatggacccttgagtaccagaagaagcacaccacactggagatacctgggaggaggcagagaagacgatgggctgcagtcactgcaacacacttcatgcatataagccatgacagcatcagaaagagctctcttctggaaattgtataaagacagcatcagcaaccgacatgctgtatttctttcttactcttttccttttagtatgatcattttaaagatgccatgcctttactgctcacagacaagagatctgaatttagctgccagcaaggagttaatgataaacaccaaagaaaaggcatgataaaaccttctcttttcagagaatcttaaaggtaaaagggatttcagagctcagtggtacatgggacctctgatttagcttgatcggactcatagatagagatcttgctttatagacaaggaaggaacctgggcaagggtccacatcttgtttgtacatgagaagctagagaccagaggccgagtaaattattagtctcttcaattctttttgaaaaaacatttaattatataactaacactaatcacacagctcctacatgttctgctaagtatgaggcaatgacagcagaagacaaataagaccttgcctttcacagcttaccaacaccaaaacaaatagaaaacgagcgatggcatcttttaaaaattgtattcatctattttactttatgtgcaagagtgttttgtctgcctgcatgcatgcatgtgcaccaggggcctgttggatcctctggaactggggtgacagatggttgtgagccacaatatagatgcatgggaattgaacctgggtctttacaagagccacagtgctcttaacctctaactcatcttcccagccctcgaatgagtgactgcatatcaggctcacttgtaaactaaaaaaatgccccacaggtacaacacagaaaaatctcatttttcacatctaaacccttgcattctactggaagcaaaagcccctgcactgggggttccttttgagaaaaagaagtgactttgccatgagaagaacatgacctgatgagtccacgtcagtggctcacagagcctcacagccggcacctgcgtatctgctgagctggcaggtcagccagcatgcaccctgctcctgcctcagctgacctaccgggacacatgtgctcattcatgtgagggaagtgtggacgtcagctctttcagagcattctgaagcccttctgcagaaggcaacacaaccagcattttgcttgcagtaagtccatcatcgtgggaatgctgtcatctactggtttgcacctctactaaccctccatctgctgattccgcgtgccactccgtagccccacagtggaagcctgtgttgctctgagtacccagatggacaggacctgagttcctctgccgtccccacagctagtgttgttgtgttggtccctaatagagtccccagactagaagattagtaaggcaattcgttttcggctaactgcatacaaacaccaagaggcaactctagggctcgctgatacctcagacaattctgttttccaagtttgattttcacttctggtatcttttttagtgtgccatttggcatcatagtgtttccattctgtaggaagctaaactttcagggttttttcccccctctcatttatatccagagtctcttgtttcccattttgagtggaattttactaataaatgcttaaacagcaactccacaaataagagtgactttttgatgccagaacaaacaccatcacgagttatgtaagttggtctttggctggcttaggaaaaaaaatttttattgttaagagcaaatgggaaagcccctacggacagagctataacagggtggggagaactgaggatattatattttagaatgcatcactaacaatttgagaaaatgtctgaaagagcaacacccactctctagcacagaatgctttttccactctgttttctggcaagaatcccaagatggatggactacacagctcacagaaagcagcccctgagaagctcatttttaagaaggaacatggccacaaatagaggttcacacttcgcccagaagaaagccctctgggtcgataaggaatgtccagccatcattcagttgtttgcctctttattcttacgtatctctggcctgagttggatagaaatgaaatgacaccaaaccttaaagtagaggaaactcttgattcgtaagtgcccatttcctctgggagtgggagcagggggagatgacccttcctgggacaaagcctccaacctgtcactctctccgagaccaagtctcgtctcgggtctactctgaaacccaagcatcagtggccatctttcaaagtcttttcctgtttattgccctaaaactggatatgactcagtgaacaaaggtggtcccccaaggccaagcagtgaacaacacactaataaatattcaagcccatgtctttcaaatgtcactgtgagtcatctttccctccttcctgcccatggttcagtcatcttgctggctctggatttgcaccttttgtctggggcctcggttcccttcgcttccctacccaccacccagttgtctttgtctcctttatccgctccactgtgccccattttcctaaaagatctggcacccacctctccacaacgttatccctttgttccaggaaataaggaaatttttggaggcagcagaggcatggctccggaggccacagggtgatatcctgtttcacctaatccttatttatatctgggttttaattgcatttccccccatttctcaagcactgcacacctcccttccttttttacaggaagggacattttatttctcattcaaaatgccttcctcctgatctcagcccctcagaacttccagaggcccttgttgcctgttggtttgctcgcgttggttgatctgttggccttgctgtcatttatggcctttcaacctcccccacttccctctttcccaacttaggccgtaacttacagcctgctggcttttctcatcttcactatcattatcttcagaccgagtcttcccaaaatggatttttctcccaccaaccctgtgctctttaaaagaaacaaagaagaggaatgtgatggcttccactgtcggaacgtctgaggctttgtttgagcaagcgcttcaaacccaaagctaaaccttgacttaacacacaaactccattgcggagaggagtacccatgttgaagcccaccaattggccgaggacacaatcagagggttattggcaggtaccttctaatctccctggtgcactgaaaaaactcaattcattaaaataataaaaaaagatcttggtccctcatgtgagcggcatgcgattttccatgaacgttcgctcagaaggctccgtgcctattatacatcccgtttataaatcaaacacccctcgtcctgcggctgcacgctgacatgtcagcgaggtttgggtcagccgcacacacttccacgtgaacagcagatgaaggcaaagagacagggaagcggctctttttttgccccccttttccaccagtaataggcagctcgaatgttaaaattgggctgggactccaaaaccaaagtcccatgaaccatagaagcaaagggacttgagatgaaaggcaggatctgtctgttctcttggagccttcacctttctttcactccccttcatcatgttcgttgggaaggaatgaaggtgcatgtgtgttcgaattaaagaatatatctaagaaaagatggggggtgatctggcccaagaaagactttggcttctaaaagctagggaaggtggttcggacctgggggtctacggctttgtctatgtccagaaacgaccactgaaagaggacattcgggttgtctaggagaaggcagtcaagaatcctactctgtagacctccatgagggcaatcaagccgcttgagccacactgtgaagttcccttgcccttccttgttgctccgagaacccatggcacctcatagcttcccttccacgtcaacagcatgaggagctgttgttaagaaaaattattttcctacagaatgaggtatgcgagtctcccagtttttgccctttgtcccctcacccatctcctaacaactctgtcatcttttgccaagaccaacagaacacagaatgaaagtgaccctaaaggggagttccactgtgacttgtgttccctttatacacaagggggaagggcattgaggagatgtaggaaaagaaaaaccaagcaaaaccatgagggtgtgaatcagccactgtaggaagtgatctcatgttgtggggttaagccaaatggggcgagccaaagaagaaaacaggagccagaaagtggggacaaagattctaccaatttttatataggtcaaacctaagactcacaaacattcctgctccccacactttgagaagtaaaggataaattatctactaaaatccccttataggaggaggataggtgattttaatttcccttgaaacaatgaaatcttgtcacaagaagtaggctgtcaaagtgagagtcagtaccagcaaagatcagattaataaaaaaaaaaaaacaaaaacggggaaatactgaatcctgactaagaaatctgacccactagctgacatcaaatctggcattagtcttccggaggaccggtaaaccatgagctcacatccaggcaggttttaggatagactggttctctcagaagtatctcactgaagggttgtcatagagaacaaccttcctcgaccatggcttgatatttgagttggaatttgatgtggttcccaaaagtcatagattggaacagattgaatgaaatataaagagatcgggtctagacacatgggtttgggaaaaactaaatcatcagctaattctaatgtacaccagaggccaaaatctgtgtatacagtaacttggccaatatatagttttaaaagcacaatcaatcatgtgcaattttgtgaacaaagatcccatattacattttttattatttttgtgtattcagtgtgtgtgtgtatgtaagcatcatggagcctgtatgtaggtcagaggacaacctgtgggaatcatgtctccccattcactatgtaggtctcagggattgaactcaggtcatcaggcttggcagcaagtgcctctacccattgaggaaccttgctggtcctcaaattttttttttttttaaacaggaagaaattggctgtgtcacctggttctcctatgtggcatggcatttgccaggagtgacagagtctgttaaggaaaatgaaattgacatgcagcagtggtccctccttggtcaatagcaaactgagtctagtgtggcctcgatgggtttggcacaaccgtgtcactacaagctatgctggctaacttttttattaagtacagtggctaagcaaagggaatttttcagtggtgtgtggtttatacttactgacctattgatatttttcttaatgttaaagtctgaacttgtgtcctagtatggtttttaattctttaattaactgagtataggtgacatagattttcaacgtacttatttgactttgtgaagtcagtctctgccatggttggcaatagttacagggctcatagaacaagttgtgatgggtatgaaattgaatggaagggcttaaagcagttggtttccttaatagcaatacttagacaatatgtgtttgcctggcttacaaacatgttgtaaccagtgaagaagcatctgtccccagaatgtcatgttgtacatccataaccagcatataacagaacagccatgttctgtttttactctacaaacattgtgagtgcttgtcacccagatattctgtctgcctcatcacttagttctttgttgcacttattttgaacttctgggctatctgtgtgtcgaaaggatcatcaaaaagtcacaatcaccttacattgtaacttaatttaatattaaaagtatttgggcaaatgcatacactcagaacagcacactatcaccactctaagatgcccaacggggttctgtagaaatgtttgcattaaaaagggaagaaactgaggcacactcaggagagtgggtactcagagggccctgatgaggcaagaatcaaataccctgagttttggtttagggcttctaaatcacaccagcttggctaattagcaaaggtcagattaatttttgaaaaagcggggtggatactgaatcctgactaagaaatctgacccatcagctgacatcaaacctaggatatgagtagagaaagggaccctacaaagaggttatgagctatgagggccgggtgtttattcctcacaaggcgagagagcccccttcagacctagttaatggcccaaataggagtggtgactggcatggggtatgtggggccttcttcctctgtacgcccacactagagcttttcattttcacacgctggagggaagctttccactcaaacacaagcatccattttcagtagcaacacagcaatagttttcttgtttctgcatagcatcaagagtgatcatctgtctatggccatactaccctgaacacgcccatttgatcttggaagctaagcagggtcaggcctggttagtacttggatgggagactgcctgggaataccgggtgctataggtttaaaaaaaaaaaaaaaaccagagtgatcatctgggagtgtacaggtcagttactgaggtgggcatatctaccacaacagaataccaacgtgggcgtctccaccataacagaattgctgagatgctttggatgtcaaatacagttagtagacttcaaagcagtttaccaatgaatcaaaaatgtcagcaacctagctgggcgttggtggtgcatgtctttaatctcagcactcgggaggcagaggcaggcagatctctgtgagttcgaggccagcctggtctccagagcgagtgccaggataggctccaaagctacacagagaaaccctgtctcaaaataaaataaaataaaataaataaaaatgtcagcaaccatgtgtttctgccaactcatttcaaacttaaattctgcacatccgtcatatgtgtacaacttacaatttcagaacattcaaaggcttatttaaaaattagaggagtcccctgaccctagaacatgtctctaaagacaagctgtcttcgtttttcagtcagtcatctttcaataacatgtttagcaatgactgccatctcacttcaggagttaaggatttagcttctatttatcacctatgtgctaaccactatcatatgtattagaattccatatatgtcatgtgtacaaattatgtacttgcaatcaccatcattatatatgtatgtatatgtttgtgaatgttgtgtttctgtgtgtatggctgtatatatgtgatgtgtgtatacatgcatatggatgtatatgtgtgtatgtatatatgtctctgtgtgtatatttctattaatcagtgttctttagaggaacagaattgattgaatatatgtggaatttattagattagcttatatatgtgtatatgcatgtatgtgtgaaaatatatgtgtgtatgtgagtatatatctatatgtgaatgtatattagtcaggattctctagaggaaccgaactggtagaatggatctctatatatacatatatatgcatctttatacatacatacatacataaacacaacatacacatatgtgtatatgtattagatagatgatagataggtaggtagatagatagatagatagatagatagatagatagatagatagatagatagacagacagacagataatttcccagagtggcttacaggctgtggaccagctaatcaccacagctgttggaaagtccatgaatccagtagctgttcagttcatgaagctgggtatctttgaaggtctttagtagacatcacaattccaaagaagtaggctgtaatgccagtgaaggtatgaacttgccagcaggagtaagggcaagatggcaaagagcaagcacttccttcttccttgtcctttatatagactgccactaagcagtaaggcccagatttagggtatatcttcccacctcaaaagatctagattttgggtgggtcttccaacctcaaatgattcagtcaagaaaaatccctcacaaatgtgtccagctgcttgggttttagttcattccagatgtagtcaagtcgacaaccaagaatagctaccaccatatgtggtgtgtgtgtgtgtgtgtgtgtgtgtgtgtgtgagtgtgtgaatgagtgtttgtatgtgtgtaaattagtgagtgtttgtatgtgtgtgaatgagtgtgtgtgaaggagtgagtgtgtgcgtaaatgagtgtgtgtgtaaatgagtgagtttttgtatgtgtgtgaatgagtgtttgtgtgtataaatgaggttgtgaaggagtgagtgtttgtgtgtgtgtgtaaatgagtgtgtgtgtaaatgagtgtgtgtgtgtgtgtgtgtgtggagtgagtgtgtgtgtgtgtgtgtgaaggagtgagtgtttgtgtgtgtaaatgagtgtgtgtgaatgagtgagtgtgtgtgtgtgtgtgtgtgtgtgtgtgtgtgagtgtctgtgtgtgtgagtgtctgtgtgtgtatgcacacatgctcatgcaggcaccagaggaggtcagaagagggcatctttgttacaagctaccatgtaggtgctggaagccaaactcgggtcctctgcaagagcaacagcagctcttaactgctgaaccattttgccacctcatcttctaaatttaaaaaaaaaaaaaatcttttctgttttctctattcatcaagttatcccactatatggcatctttaaagaagtaagcatgcaagggaattccaggatcaggtgtctgaagccaccagattgtccacacagcacccttctggccacaagaagtgacactgatgtggattatgctgaacacagaaaatagtctagcctctggatattctagaaggtatctgaaggcctaccaaggcagcagtgtagacaatagagccagtgacaggaagaactagcagacaccatggagccttgaccaacaggcccagaagctcagacagcctctgcatcttacatgagaagatcaactcctttattgtaaattctttctttcctttctttttaaaacagtttttgttttgttgttgtttcaagacagggtttctctgtgtagtcctgactgtcctggaactcactctgcagaccaggctggcctctaacttaaaaagatccacctgtctctgcctcctgagtgctgggattaaaagggattaaaagcatgtgctaccacatctggcctaaattatttctaaagagtgtgtggtgtgtgtgtgtgtgtgtgtgtgtgtgtgtgtgtgtgtgtgtgtgtgtgtgtgtgtgtgtgtttgagaggacatcttttggggggtcagtctctcattctgcttaggtgaggtagggtaccctttctgctgtggacctcaggctacctggcctgtgagcttctggcagtctctctgtctctgcctctctgtcagggattaaggatgagtgccaccaaaccaggttttctatgtgggcttcaacaggctgcacaggtgattcatttaccccctgagccatgttcctgacccatttcctttatctaaaaggtgggtacagcatgagttttctcttctgataatctcagctcatgtctatcctgtccagattgtatgccattgttatacagtctattttaggggtaggaaacctcccctgagtttgctcagtttcccagttagcgataataagagcattgaaacagtctggcagaaaattcaaatattactgacaaaacacatttacagcatggacttatttgcagttgagagaactctcaactccctgtaagcacttttactcactgagccatttcactggccctgtttttgtttttgttacagaatatcacatgatagcccgaactactctgatactcactaagtagccaaggctggccttgaatttaagatagcactgcttcagcttcagcactggatggctcagctgttgctcttcaacacagtagggaaggtgcagcaacgtgtcttcacttgagaaaaacttttcttttctaatccttcattaataagagccctgcttgggcacaacttctaaaatgttactttttaaaaatgtgtgtgtatagaagccaggcagtggtggcgcacacctttaatcccagcactcaggaggcagaggcaggtggatctctgtgagttcgagaccaaactggtctacagagccagttccaggacagcctccaaagccacagagaaaccctgtctcgaaaaacaacaacaaaaaaaaatttgtgtgtatagggctggagagatggctcagacgttaaaggctaggctcacaaccaaaagaaatgtgtgtatgcatatatatgcatatatacacacaaatatacatgtatgcacacatagatccatatacatacagagacaaacacatatgcacacacacacatatgcagccatacagacacacacatgcctgtgtgcatgcagtcgcctgaggaggctaggaaggagcttggtgacactggaactggagtaccaggcagttaggagctctctgatctgggtgctgggtgctgggaactgaactccagtcctatgtaagagcaatagtgctctcacctgctgagccatctctccagccctatgtgcctaacttaagagccacttgttctgccatcaaagagagacccatcaagtcataagctttagaaaaagaggaaagacttgtcatattacaacaacaaattgatttttatttcagaaagccaacataggtgaggacagctccttgtagagtcccttaattgcattcttgcactttgcaacacaaaagattaatatattattgattaataacagcataataatgcaactcaaaatgaagccatcccagtgtcgagtaatgcagacatttgcagaaaagcagaccagatcattgaggaaaattagcataccctccaaatgtggttattagattgcctctctagagtactttagatagccgtcaattttctattttggatagggaaatgatttcctaaacaaaatgaaaaactgcacgaatgagcacacaggacaacatgtgcacagtgcagcccttcatcgtctcctctccagcatgcacattcactgtcttggtcattctatctgaggtcatggcttctattagaggcttgggacctctctttccaactgccttcatgacgactttctctggatggccctgagacagctcaaactctgcatgttcaagggccagctctggttcatctccctcagatgtattctattctcaatggatgtcaagtccaactttctaggtattcaggacacaatgtggagccagcctggattcagctctcagtcttctgttgggtatgccatcaaagcacacacagtcacagcagcatcgctgtcacctcctgcctggattgttgcagccatctcaaatgggagactgttcctctatttgtcccttttacaatattcattccacacctgcaactatgtgaatttgtctgcaccccttgtaatgtaggtgcccatcaagcagcagttctcaacctgtaggtcttgacccctttggggggtcacgtatcaggtgtcctgcgtctcgggtatttacattatgattcataatagcagcaaaattacagttatgaagtaacagcgaaataattttatggttgggggtccccacagcatgaggaagtgtgtcaaagggttgcatcactaggaaggttgagaatcacttccgtagagggttggatctcctggaactggacttacaagcagttatgagtcaccatgtgggtgctgggaaccaaacctgggtcctccgtggagagcagatgaagccctgaattaatgtcgactgttaacatgagcatggccatgttgaggatgccagtgcatcagactcgtgggaatggaagggcttcccaggtaggaatattgactaacagttggccattaaaaacagaacatgcagagtatccaagataactgcatgattgcagcccctgcactgtgcttccctgtagaggcctcctaccttaatcagctagcctgattgcttgttcatgctgtataaaacaaacacactgagaatcctactgctgctgtgtttccatctgagcccaccactcaccagatcccagccttgtgttctggtgcctgtctttcttaatctcccatcacccccagtcaggtttccaagagccagctctggaggccgtggcagtcctctgcaggagcagaaagtgctctcaaccacagagtcatctatccagcccgtatttaaaccaaaactctcatagcaacctctgtttgtcctcttttctccctgtctcatgtcattccacaccggccctctgagctttctccacccttctctctcaatatccttggtaccaggtcaacaccaggaaatcatattgaacaaagcctaccctggtgtctcagagtttctatttccgtgaagagacactgtgaccacagcaactctttaaggaaaacatttagttacttacagttcagaggtttagcccattatcatcacggtgggaagcatggtgacaagtaggtagacacggtgctggacaaacagctgagagttctcacatcttgacccacaggcaacaggaagtggtctgaatcactgggcatagcttgaccatgtatgagccctcaaagcccgcctccacagtgacacacttcctccaacaaggccacacccactccagcaaagccacacctcctaacagtgccacgccctttggaggccattttctttcaaaccaccacacctgggggtcctgtttagaacctcaacctggaattgatcgattctttttctacttttcctttgaaatcattactttcttcttttactgtgtatgtatgggcctatgcttgttatggcaggcaggcatgtggaggtcagagaacaactttgaggggttgtttctcatttactttctcttctccaagaagtattttttcagccgggcgttagtggcgcatgcctttaatcccagcactcgggaggcagaggcaggcggatctctgtgagttcaaggccagcctggtctccagagtgagtgccaggatagacgccaaagctacacagagaaaccctgtctcgaaaagccaaaaaaaaaagtattttttttcaggggctgcaaaaatagctcagttattttgtagaggttcaattacagcacacacctgggggctcacagtggtccacaactctaaaacccggacatacagacttacaaggaagtaacacaccagtacagtcattgatactgttcttagaccatttgataataattcagggatgccattatggttttacacgaaaacactttgctgaacggcaattaagaataaagacattgtgacattcttctgcacaaccacaaataaaagaccatatttaaggaaatgagtattaatattagcaagtagataattcatgagcaatttcctcaaattcccaagtttttttttttttttttgcttctagagacttctaggaccgtggagcatattctgtataatcattgtcttcctctctcttcctgcattttctcctcttcttctcccctccttgtctataatatcactgacataacatattttaagtatctgagccaatttcttcatcatcagattttttttatttttttttgcaaaatgtcttcttagaaattaacatttcaatgcattacttcatgcctatgtggaggcagtaccatgccatgactctaagcctggcctatgcagccagacagacctatgtgagtgcaagtcagcctgtacagctcacgagctgtgagaatgctccctggctctccttcacccccttcacagaacggttgtgccaacagattgacatgagagatgcatgtcagagtaccaggtacatggcgggtattgcgttgagtgttagctttctttatggctgtgaacagcaattcccattgaatggctgagctggagtgggagaaatgcaaggcaactttacatctcccccaagtacacaggttctatggtagctcaggtgtctggtttgggaagtgtagcgtttctgcctcatctcctcttgataaatgacagtcattggagactcagaagggagaggaaaggcagcttagactcagaggtgagccgctgtgaccagacatgcctgtggggagccgcagaggtagcaacaggtccacccttgtggagaccatgaggggtatttctgtccgtcattcgtgtgcacctatctctcctctcacagatcttgagcaaacaccttccttgcagctcttggagcctgtcaatcgcatgctgtgcagctcaatggaagccacaccctctttccaggcctcaccagagtcacccaacaaggccagggcacagctgtcacgtggcttgaaatacactcttgatcagctgcctcccctgccctaactgctccccgccatggcaccactggtatttcctgggcccgccacatctcagagtctgcttccggggacccgggactgaacctttacctatggcagagtttaagaagatggatcagggccagacatctacaaaacctggagcaatgctgtccacacagtaagttcttcacaaatttaagtatggttagagatggaggatgaacccacagcaccagggaccggccagggggctccataggagattcagacaaacacaagtgccggcacacaaactcttgaaaagtattgatggtgcagcctcatcctcataattgcttcccatcacatcactgactggccccttgcccttaattacaagggaatgaaggctctggctgagttgtaatacaaagagcctggtgccaggtgcccccatgagacccaccgcaggcattcaatttagctaataagtatggctactgggagacttgaatgttctctctcctgtggacagcttcttcttcttcttcttctttattttttttttaaataagtgaaactctttggttcatcctttcacccggtttcacagaggacttttcacggtggcttgtttgaaggcgagcagcaggagtcctaagaacttaattttaagaaattcaaagagcaaggaacacactttgttctctgcctttcttaaacctatattgccagcctttcatagtaatttgtcttttatggataaaatatacacaaaatcactgagagagaaaggcagctgatgtgaccttggccaaccaagtccttctgtttttaatcggcgtgcaccgaatgtattattaagatttctacatggtggcattcccagcgagtaggtcggctctgagagagaatttaccgtttctttatttttcagttcaaaaaaataagggcaaagaaacttgtacatgggattttttttggctgataaatgaaaacccaaaaaaaaaaaaaaaaaaacctaatataggcagaatcccaacatgctaagagcagaactaaagtcatagtgtctgggggaaactgtgagtgaattattgtgatcctaggtgctaaaaaattgattcttccgggttctgtcatctgaccccactccagactggcttttgtccacttcccagcacttgagccagtaatgatctcctccaggccagactgcacgttctctccgctcccgcgctggctttcatctatttgttgcctttgttcgtctccaccactgtcttcctcctcctccataagcccctcttcttctaattttgtctgatcctttagtatttctgttcttttctagttccatattttaaaaataaaaatgaaaacgacaattagagaagagaggcaaaaaaaaaaaaaaaaaaagaacccaactcaagcagtattattttattgtatttttcttctaattttttttcaggttggtttttatgtgtcgtgaatagaatttttgtgtctttctctgctccaccaagcactttcctttaattatttcatgtatttataacctctctaatttttcctaatgtctgcttccttcctggcggttgtctattgtcttcacctgtgggcattcaacgctctgccctcttcccccaaacccatcggagagcccgaagctagagcctcgattctctttttgtctgttcattcaggtttcccttttgttctaagagatgagtatcttttttttttttaattacatacgtttatttatgtgcggcagatatgtgtcactgtgttctgataacacagtgataacacagaaggacgatgtggagttcattccttccttgcaccaccaggtgtctaactcaggtcatcactcggcagcaagcacctttaccctctaagccatcatctctctgatgaatatcatttaaaagaaacattgaaaagcctttcagtgctcccaccaaaaccatccagaccttagacagcaccgctttccctggaatctaacctggtgatggacatcacagagatcccaatatctaaactatcttctctcctctaagtcattctcaaggtttctggagcgcctagagacgcgcggcagctgtctgtttgtgcctctttgcccattctcttccagaatggtgaaatattcacagccgttatcttctaaaggggtggggggggggcggagtattgccagaactcaaaaaagtttgaaaacattaagttaggcaaattttctgtcagaattgaaaatatccaccctaacatgcctctgtctgtgtgggtgtcgttcccctgttctgtgactgcgactctgcaacacctcccaaatgggaagtgatttctttataagatcatcatggcattgtttgaactagtttatttattttttaattccaaatgttatcgaggtgtagcgtctcacaaggttattcccagcaccaggaggcagaggcaggtggatcactgttttccatgctaattggcagtagaacctgggggagtagggccttagaacaaggcagactaaagtctcatgcaataaccaactttattaagagcaccagacgatttgtactctgatggataaagagtcacatgtaaagtgttcaatcacaaggacaagccacacgtggcaaaaccgtgtttttccatagagacatatgatgaacaactactgaagccctcctacccgctacccctgggaggagcatgaaaacatattccaggaacagttccatgttctggagaaactgaggtcgcaagacttttgtctgttttcttggtgtttttgcacaagcactcagaatcccctcacatgactttacccttggactatgttccaacatatctttctgaggtagaggccagcctggtctacttcaaaagctgtaggccagccaagtctacacagcgagaccctgtcttaaaaacaaacaaaatcccagacgcttttcatgtctataaagctgggggttggggctggagagatggctcagaggttaagagcactggctgctcttccagaggtcctgagttcaattcccagcaaccacatggtggctcacaaccatccgttatgagatctggtgccctcttctggcgtgcagacagaatatacataataaataaataaaacctttttttaaaaaaagctgggggttggctgtgcaagtgacagtttaataaaagagcatgcagccattataaataaagatgcaagtcacattactgacaataaaagaggagagtttggagcagttaagggcacttgctgttctttcagaagacctgaggctagttccaagcacccaagttgggcagttcacacccacctgcagctccagctctgtaagagtcagctcattcttctggcctccttgggagcctgcacatatgaggtgcacacacatacacacaaatgtaagcaggcagggtgctgacacacacctagaatcccagcactcaagacactgcatttggtcaagtatcccaaaagttgttgctaaacagtgaaagatttaaaatgcatgaagtaggcctaatatttttttcctggagctaaggcaatttattgttgttgcattcaatttaaataagaaaaggttaaactaaaataaattcatgaacttcttttccacatttccacaacttgtcactcaagttttgtcaagtttgcagaagtctctactcctaggtatataatattttcccttaaagtcccatttaaactcaggaaaccctgaagtctgattctgtgacttggagcacacatcaatcatgctgctacggtttgaaatggtcccacgaggctcctaggtttgaacactcggtgcccatctgctggcactgctttgggcggttgaggaaccttcggcagtgtggtctggggttgccaggaagtaggcactggttactctcagcactggtgactttccaggctcttgctgccatagcccagattgcctccatggccatactttcccgaaaacaaactttcttcctcagagcaactgcctaagggattcctccatgtttgtccctggctttacaagtgctcttccagtatgagtctctggctttcctgaggtccagggtgttaagaactgtgtttatagtctttccccaaaggagagggcagagcagttgatggatttgagaaacaacagcatgtctaccagagtgtgttgatggctgagtttcatctttctatgttaaaaatagggttccagcgcctgcttctgtggtagccagcatttgttataattcccaagcggctgaataccatctgtgtggtattatccgttccttcaagtagtgtttattgagcatctacattctgtctggcactgcctggggctacagcagtgatcaaaactgacaccccgagagcctgaggcgaaacatctagtggtttttatagtgttctaattctgtgtttcctcttctagattctaaaactcctggagaacaaggcctgtctggctctaacttaatatgttctaattatgtttcctcttctagattctaaaactcctggggaacaaggcctgtctgcctctaacttagtttccaatcccccacagcacccaaaagaagcatttggcaccgacaaatcaggaggtgactgagaccacacaacttcagcgtgttgcctttcactcggcctgttcggtgtttcaccctttgactctaaaagctgctccaaactcttccttgtttttttcccacttcgtttattgttctgcttttggttttcaatttctctgagtttaatgtataaaatgttaaagaaataacgatgatccagaaaagaaaagtggcaaccaatgcaagcaacgcaaaagaagtttcatctgatgcttccgaagctctgcttcagaaatactcgtgaagaaacgcttcattcttttttagatttctgtctttaaaatgtcttactgcatttcagtgtgtgtgtatgtgagtgtgtgtgagtgtatatgggtgattgtgtgagagtatatgttgtgagtgtgtatgtgtgtgcacgtgtgtcagagcgtatatgtatgcattgtgtgtgtgtgtgtgtgtgtgtgtgtgtgagtgtatatgtgtgtgagtgtatatgtgagtgtgagtgtgtgtatatatgtgagtgttatgtgtgatatgtgtgagtgttatgtgtgtatatgtgtgtgtgaaagtatatatgtgtgtgtgtgtacatgtgagtgtgtgtatatgtgagtgtgtatatgtgagtgtgtgtatacgtgtgagtgttgtgtgtgtgtatgtgtgtgcatgtgtgtcagagtgtatatggatgtattctgtatgtatgtgtgtatgatatgtgtgagtgttatgtgtgtatatgtgtgtgtatatgtgtgtgagtgtgtgtgagtatgtatatgtgtgactgtgtgactgagtgcatatgcatggatatatagatatgtgtgagcatgtatgtatgtggtgcatagctggaccacagtatgaacttggaggtcagagttggttctctcattctgctgtgtgggtcccagggatggaacttagtccatctggcttgtcagcaggcactttctgacccatctctccttagggttcataaaacatagtctttacagttttcgagataaaagtgcttactttccaaaaagattcaaataagcatttaggtctaagctgtgtttgagcatacctcacaagctcatgcgttaacaagcaaaccagaaatgctctttcccagcttaggaaaaaaccttatgtgtttactttgatcttgacagtttgccaagtcacaagtgttttaaggccattgccgcttagttttccttaggtataaagagctaagccacatacaggcttcctcagacgacgcctgagcatctgctctgggaagtttggtgactgacattcggccatgttcagtctctgtggattcttcagctcacagcaatgaacacttttattcctgtttttttttttttttttctcctcatacaaaagaaatagtaaacagttgtactgagattctatgtaaggactgagcctgggaggcagatagctggacatgtctggctcacagctgcctctctgtgggctctctgttctcacatgaaatcaacaggatttcctggagggctgaggagattgaggtcatggcctttgggaacaaagtcaagttctgatccagccccctcctgcggccactagatgacactgccgcctcaaaaataacaaagtggttcgtggctcatagcaaaaactatcacagagctctgaacttcgctgtattttgtacattgtgctggttttattactattattaaatgaataataaagtcgtgagacttctaagagagaaaagataatgaatcttgtccaggaccaaccatgtcagcagctgggccttagcttggatccatgtggcctttttgttcaatgttaagtatctgttcaaaaatactacagtatctgaatcatgacagcaaagtcagatttaggctcacaggagagctgagcacagctggttattcaggaatcaggagggctggcaagatggctcagtgctaaaagcacttgctgccaagccttacaaccccagtttgatccccaggactcacacagtggaaagagaaaaacacttccgaggactgtcttctgacctccacacatgccatggtttgtgtacttacacacacacacacacacacacacacacacacacacacacagagagagagagagagagagagagagagagagagagagagagagattgcaaaggaatctgatagttcaagtgtactattgctctggctctcatccctcccccagtatgaacagtcttttctggggtaaccatgcttgacagaaacactgcagtacagctgggctcaggtgtcatattgtgaattatgcatgaggggactcaacactcactgcaattgagctctgggaagaagagaggcagggagaagccatcaagacttgggccaagtcagactaacagaatggaggaggggtaaaaaaaaaaaaagccatgtggcagaatgtagacttaaaaaatatggactaattaagttataagagctagctgggaacaagccaaagctaagggccaagctttcataattaataagaagtctctgtgtcattatttgtgagctggtggtcccaaaagaaaatcaaaacatgggaggaatgttaccagctaactgatcctcaaaatagatgagcttttgcatgtttggtgttttgagccggggtttctctgtgtagccctagctgttgtggaactcacaatgtagagcaggctgtcctcgaactcacagtgatccactggtttcctctcccaagtgttgacatttaatgtgtgctactacacccaggttttgttttctttttctttttttcttttttgttttttcaagacagagtttctctgtgtagctttggagcctatcctggaactcactctggagaccaggctggtctcgaactcacagtgatccgcctgcctctgcctcccgagtgctgggattaaaggcatgcgccaccaacgcctggccattgttttcttttttttaaagatttatttgactgtctgtctgtctgtctgtctgtctgtctgtctgtctgtctgtctgccagatgactgcaggcatccacggaggtcaggagaagccattgtagccctggagctggaatcacaggcagttgtgaacagcctgatatgggtgctgggaactgaactcaggtcctatgggagaacagcaagtacttttaactactgagccttctgtctagagagaaaagccctgtgctaatgacagacaagaaagggtgactggtctgtgtcaacaccatattgaggcagtaatctggagtaaatgtgggtgacagcagtaaccaagactgtgggatggggagagaccagggaggtgaagttcatccataaatggggtgtttaagaaactatgcaagagctggagagatggctcggtggttaagagcactgactgatcttccagaggtcctgagttcaattcccagcacccacatggtggctcacaaccatctgtaatgagatctggtgccctcttctggtgtgcaggcatggatgtagggagaacattgtatgcataataaataaatcttttttttttttttttttttttttttttttttttcgagacacggtttctctgtgtagctttggatcctatcctggaactcactctggagaccaggctggcctcgaactcacagagatccacctgcctctgcctcccgagtgctgggattaaaggcgtgctccaccaacgccccaccataaattaatcttaaaaaaaaaaaaagaaaagaaaaagaaaaagaaactgtggaagttcttctgatgagtggtacaaatgtcatctcaatcagtatttatcccacccacatttgggtggctccgtgatcaaaaggactgtttggtagcatccatgggccatggctttttctcatccctagccatgctctggagtgtcttagtgcgttctaagagctgtagcaaagcaccatggtgatggttctcgaggccaaggtatatatgtttctcttattggctaatgaatgaaacactgtggccaaggagtcaggaagataggcaggactaggagacaaggagaattctgtgaaagacaggcaggagctgaccaaagtcaccatgtagctaccgggaggataggatgtaccgagcatgctttgtggtggcaggacctagcgggaccagagaatctccagctacaagacacccaagagaaaagttcaggaagatccccttcctcaaatgcggtgcttccttcctgtgccaggacacagcagaagggtcaggtacccccctcccccatctttctaataagggcatgaacccactctcaggttctaattccttccctaggaccgcacttcccactgggctttcaactgtgcaaacctggaccaggaaacatttgcaaaccatggcatggtctccttggatgtctaggaagtcactttcccggttcccgaagaaaccttggaagattggtgccctttctgttagggaattctggagtctacgtgagactggggtgtggagtatttccaccgtgagccacctcaatctgatagagttgcagctgtgtcctcatccgcctggaaaaagaccacagctcatggagtctgattttccttccaatcctgtcttaccaaaggcctggggagtcctttctggtggtcccctccattgtttctacctcagcatgactttttaaaatggagatctgagatctcgatgtttctgcaatcccacactgtaggctactgaagctcaagagtctttaagagtcttactctgcaatcttatttcttcggcaagtcaaggcagccaaacaagaggtcagagatgaatgagggagcagagttggaatgtatggtccctggctagcatctctagcaacagcccgtcagactattgaggaggctattgcgctaatgtagacgcaaagcgtcaactggcagtctttcctgtggaatcaacacagggttgaggatgggaagtgaagttgggggcccaggtggagcatgtccattctcctctaatggggtttccatggcgtctgcttccccttgtcctgcccatcacgaatcctaactcaccagttcctgccaagaagatcttcaaatctatccttcctccccttgtgaacaccagcatccccaccccccaccccccacccctgcctaagtcattgtctactaagtcatgaaagctgcctttctgaaccaaaaatctgaccctgccagcccacattttcccccagcactacaatggccacactgcactgtgtagtctggttcctaggcacaggtatgtcatgttctaccctgtcacctttatggggatgtctggcctagggctggagctctggctcattgggaaacatcacggtgaagtgttccacggcatggactcattgctaagtacactggctttgatcagacaagtaatttttaagttttgcagtgatccaagccaaactccaggccgtgtacatgtcaaataggcacagtaccactggtttacatgcccagcctcgagcagagaagtttaagttcaggtcttcatctataacacgcccatagaaggcttaaaggagaatctaaaactttttatttgtgtgtcatggagtggggtttgcctgtgtgtgtgtgtgtgtgtgtgtgtgtgtgtgtgtgtgtgtgtgtgtatgtgtgtgtgtgtacaccacatgcctgtagaaagaggactgaaattagagatggttgtgagccaccttgtgggtgcttagggtcccttcctggtcttctgcaagagtagccactgttcttgaccactgagccatctctccagccccctacgtgagaatgtttcatataggtgcctagcacacagtcagagctctgtagatttttttttaaataaaattatcccctggatgtccaatgttcacctacctacagaaattgcagccggtgtcttttaatttatttatttattgtttttgtttttttcgagacagggtttctctgtggctttggagcctgtcctggaactcactttgtagaccaggctggcctggaactcacagagatcctcttgcctctgcctcccaagtgctgggattaaaggtgtgggatcccaagtgctgggatcacctttgtgtaagccgtttctcttgtagactggatcaatttcatgtagtccagggtggcctggaactcacagagatcctcctgcctctgcctcccgagtactgggattaaaggcgtgggcccccacccctggccgctagtgtatttttcaatcctcttcactccatcagtcttgcagttcttgctgggagttttcaatggaacttctattgctttcctgtagttcctgtgacaactgaccacagatgcaatagtttaaaaagcaaaaatgtacctctcatggttctgcaggccggacatctggacatagcatgcctgagctaaactcaggctgtcacaggccatgctccctgcaggggctctgagggaagacaggcctctttgctgacagactccacgttagggccacatcaagtcaacctgtgtcctctagcacgtgctgcctcctcttttggtcaccttagttctccttcagcctctctgtaaagggaccttgggatggaattgagagctgggaggctctcactagctctggtcttcaacacacttgtaagtaagtctcccttttaaccatacaaggcaatgtttacacgctgtaggtatgaggccctaataatagtgtcgttacccgggtccttcagaactgtaccttcctacaaccgtgcgagcaccggattagatctttgctctctgtggctgtagcacccggaatgtgctggatctcctctgctcatgcgcagcagataaaagtccttacagaggaacaacagccttctgtggcccgggtctgtgttcccttctggtccctctctgctagggctttatttcctagcccagagctgtttcttccatgtgttaatctgcagctggaaggatgctttacaaatggattagatgatcttctaggcttgagcagttaagcaaagggggcctttatcctgtgccatgtctgcttttcagtatgaggcagagaggctccaaaccttccaacaccgcttttcccaaatcatgggaccaacaggacaggagatggtagacaggccctggcagccatgcagcttccttcacggaatgtgagaccgttgagtggcacagtgacaagcatgagctgcatggagggtgctgtcatcggtctgtccgggctggctgggagcctcggccatttattttaagcatggttttttatcataactgagcctcctaactttatggctattgcttcactgtccgtctccccatctcgagtcactcaagttcatacggatttttctgaaacgaagctgcctgttttccagcgatctcctgtgacagcacctcttgcccgagatgccctggattcagtgcccagtgccccatgaaaccccgagtggtgccgcacatctgtaatgctgtcaccagggagatagaggcaggaggatccaaagttcaaggtcactggccagtacttagggaggtcgaggccagcctggctcaaagcaaaacatgcagagagggagaggggggccagggaaaattcctcagtcattcctcacagtgagttcttgaaacagtcggttgtgtactgttttacaatcattatgtttacatctatgcaaatcttttcatttttgtactgttaagacaccctcccacctcccgcctcccccagtgcaaaccggaatgctaagatgcaaaacaaatgacagcccaaaagtacactgaacatctgcataggtgggcatgtttagaaaattccaaggtttgagaaaacgcttagacatccagaactgagagctaaatgaacctctcttcttcataaatcactcagcctcccaagctttgttaccgtagcacaggacaggctaagacaccagggacaaacgtcctttctgagcagtgagaagcctctggcgggtggtaggctgtgtcaaaggagcgctgctgtagtcacacgcctgccactcagagtgctgttcactacacgtgagtggtacatgtaaaaagtttctcaaatcttacactgttttaaggtacgtaaggtgtgtttaataaacacattggctctatggttggaccattataccctgtaactgggagtaattattactgggctcaaatacttggggttggatgacccagggctatactttgcccaagtttagtcagtccatggttactaagtgaggcctgcaagatggttcagcatataaaggccgccaaacctgacggacaacctgagtttgaatccctgcctcaatcggtggaaggcaagaacctactcctgcaagttgccctctgacctctacacacatacatagcctatatgccataggtgcatgctcacacacatgaactcatgcatataaaaacaaagtataacgtactaacaaagtataaatttggacaaaagaacccacacccatgctgtcctgtccttggaggaggaaggtttattaattttatcgttaaagaaattttattcaagtgccacaaattccggattttatagtttaacccggtgaacaaacgcttgggaaagaactgcagctcgcgctgaacctctgcaaagttgattaactgttgtggagaggttggaatgttgcaggtctggggcttaatgaccagttttcttcggctgtcgttgacagccactccttgcctaccctgtgtctaacctaacatctttgtgagtaacaaacaggtaaagccttgggaacattaatcagatggctaactcacaccaacccaaaagctaaggaagcagtcagaccgcatccgagcgagtgaggcctacagtgaggccgcctctcttccgaagccatctacctgatggtcccacagacagacggacggacggactattttacgactttctttgttgtgttactacagacattttatcaaacgattacatcctcggaacaagggatttggggtttaccccaacctggccatgatccctcatacgggctccagaatgaactctctctagtgccccgggagggaggtgagagacctgtggttttcgcacgcacagctcaacaactgcaagccacgttcactcccgccctgcagaagcagcgggcgcctggcttcagccgggtgggtgcacgcggatccccgccggcagggcgcgccctgcgcacccacgcccagccctcccgcccgcccgcccgcccgcggctccgaggagcgcccagggcccagcgcccgccccgagcgagccgagcgcccgagttccttgaaggccggcggcggccgcagagcggctctccctccctccctgctccctgctccctcctcctgctcgccctccctcccccctccctcccgtgacgcgcgtgccccgcagcgcgcagccgcagcgccgccagcatgcgcgccgaggcccgcggtggcctggagcgcttctgcagcgcgggcaagggccgggggctccgcgcgctgcgacccttccacgtgggcgacctcctcttctcctgcccggcctacgcctgcgtgctcaccgtgggcgagcggggccaccactgcgagtgctgcttcgccaggtacgcggcggcgaccgtgcggggaccgtgcgggagggaggggccgcgcggggccacgtgcgccgctccgcactgccacggcctgccccgcagcccggcctgcgccgccccacgcctgcccgctttaactcaggctccctgtctgggccaggccgccccgagatgggcggttcccccacgcccaaggcgtgatgactcagtcagccagggaccctgcgggtccttgctaggaatgagggggacacgttactggggggttgttggattgtagtacttcgtccgtgagctgtgtgtagttgtagaagttgtaccatatccatacgccaagccttgaggtagctttgatgcagaaaggtaccttctcaccccgactcttcactttacaagacacactttatcttaagagaagagaccattttacagttgggaaactaaagcccagagaagaagggtggctgtgtatacaccgggtacttactagggggctgaaacctggcctggctcagggctagccgcttcccctcactcctgtgctccctaagtttgctgaggtaggagatatggctttggagttcagcctgtcccaggaaacctgaggaagggaccctgccctacttgctttgaaggtcaatggcttcatctttgaaatggggatgctgggttaagctaacttgaggttctgcaggtacctcttgagggctggtctgagtccaaccctcaaggaagccctcagcctcccaggcccgtgtgcgtcgttctacaataagacaacaaaagaatggacacaagctgaatattagagtaatatcggcccggactccctgctagaactgtcttccgcttggggggacctggaaaggaactagacgcagaaccatgccgtgggcagcggaagggctgtatgtgatgtgcctctttgaattggtgagccaagagctaaagggtcatggcaccactttgcgacgtttgagtgaagtgagcattgggttttcccaaagttaaaaaggctgctgcgactggtcccttgatcttctgagcctcgctgtggctgggagtctgctgcagtgtgggtgtctgcagtgccggagcagagccggtcaccctgcacagaaggggcctccatcaggggtcctggtgcttgctggaagccacagtgtgcagtgaactggtgcaggccttgctgagtgcatagtagggtctcatggtgcctgtcagttctctcctcctgaaattgagtatctgcattgacagccgagcgttctcttctgttgggagtgccctggttgtacacacagccacacacacctctgagagtaccctcagatcagtcagcccccgaatcctgacatctgtgaagaagtttgctgtctctccttttatttttctgtttgacattagttaatgtccttaagttccctctcccgggctgtcacatggcagtcgctccatcctacaaagtcttctatcaccagccagagtccttggaaatcagctacagttttgcaaaagaaataaaactcaggagacccacgcagccagaacaatcttcgcacctcatccaatgattgctgtcagtctgattagttttgctaggtcattcaaatagactgtgtagctcaggctcctgtctgtatgaccaaggcctcagctgtttatgttattagacacaggagtgcctctgtgcggcctcacgagtaggagcattctacaaaagggggagcacggagggccggccatgtgccacgtccccagatgaaagctacccccaatgctttcttgtgctagaagtatagtgagaagattgtcacttaagatagatgagccacctctatgtatcaaaattcaactcacttggaaggaaaaacatagtttcttcatgagagaatatattgtattagtcaagaaataatgatagattttttttttctttttgctctctacaaaataggattcttagtgtgtggggggtgaggagtggggggattttttttcccctgggagttttaaattagtatcacgttttctcagcttggtaggtgacatttgggaacatgcagatcttgcctcagctgctaggaggcaactcctaaaaatataaataatgtccaggcgagagctgtccctcttacacacacacacacacacacacacacacagacacacacacacacacacacacacacacttctatgcttgtatacatgttttggtcactagttaactttctgccaggttcttaaaggagacacacacacatacatacatatgtatgtatagtcttctgattcttgctttagttggcttcagaaagaagggcccaggtgtagccaggtgttgactagaataccctagaaaattcattctgcctctggggacagaggtccctctctcttgatctttattctcttgtacctgggataccatgtgacaaggacggtttctgttctgagtgtgtgggagaacccagaggccctcttggcctttgccattgggctgtctgcctcctctgactcacagagactgcttgctttaagaatgaggtgatgaaggtgtccatcatgagtagttagactttccctcatgtccccagggttattccctagtgtgtccggctcacctggcacaataagctttagtagatttactttaccttgaaaacctgctgctgttttcctaaagttctctgaaatagatcctgccttagactgtggtgtggcattggaagacaacatggtgctcagtttccggcagaggaaatacgatttaaaatggtctaaaatcatcacaatttctaaatgggaaattgcacatatgcactaatgaggttttgccctcatctgttaagtctgagtttattaagtaagtagtcagatgaagacacactggccaaggatgtcctttaaaagtgacactctggaatacagacaggtggcgtatggcacacacacaggcttggaatcccagctgcttgtgaggctgaggcagaaagatggcagctacagagcaagctcagggctagcaaaaagaaggatgagaacgctgctcaggggtcgggtatgtgtgcagagagccctggtatggggtggggtcgggatctgtttatcaggtgaagagttcttgccttgccacttccattgtttttagagctagcaaagcagggacttggctctgcatagaatggctttggattctggctgcctctcttccctggctgctgtctgagccactgggttcctctgcctggaaacttagccttcaagtgcccaccctgcctagctcgtctagttgaagctgagagtggaagtcaggtacccggcaggctgaggacgctgtcacactgtagcctggtttattctggcatgggcttggccactcccaattttctgactctaatgacttgtgtataaaatcctgtaaagccagggacatgctttgcaaggtgaatggggaccctgggatgtgtgtacaaactctactcgctctcctggggctggagccagcctttctcctgggtactctggagtggtaacggggtgaatcttcactgtttcctgacacacagtcagcattacacatacataggcagggatccttcggaaagttccgcacagctccagagtgttcagacaccttattctttcagcaggagattaagcagatatttaaggggaatgagagaaaacagaattttccacctaataaggccgtcgggattccctccctccactgacattcttccaaggattgctgttaaagtcaaagtcttagccttctttagatagtgggatgtgtgtgagcgtgtgtgtgtgtgtgtgtgtgtgtgtgtgtgtgtgtgtgtgtgtgtctgcatgtgtacacacatgcacatgcgtgtactcacacaagctctgaagcacaatctgcctattctcctttactcttccctttataggtagcaaactaatgtgtctctcctaagtcggaagttgatcctaggtgcctggtaagcaggccactgagctgtgtccccgggtccttttcctaatttgttgtgttattttttgttgttgttttgttttttgtttttgtttttgtttttttctgagacagggctctctatatagccttggctgtcctggaacttacagagatctgcctgcctctgctgggttaaaggttagtgctctggtgtgcagccaaggtttcccaggctgtccctgaacccactctgtagtctagatagccctcagactttcaaccctgccccagtctcagtagctgggatggcaggcctgagccaccatacttcatgcgtttctaaagcgttttaaaatcggttggctcagctgcctttactctgtgtcttaggcagatgtgggtgcttggaatctgatagagagccacacacactcttctgtgtggactgtcactgtatggatggcatgaatcatgcctggagccgcatgggccaccgccatctctgcctttgcagagacctcacttccaagcagtctagcgggacagggtttgtgattaacctctcttcctttcatttagttttcagagcctctctgtgtccagattgcatgggtgaggcttggagatcggatttctcttgtggctttaaaaccatgaagttcctgggtggctttcttgcaggacaagcaggttgcccacttcctatcgaaggccctttaaaaatgactttaaaaaaaagcctgcaggtcccctgtaaagacccaggctcagggctaaatctggctttcagaaaaactcagaatggatgagaattgagtctgttttagaatttaaagggggtggggggatgcccaagaaaatgtctactgtgcttcagtgtttctgactccctccttttccctccttttgctagggttaatcacctcattcttcctgttactataaaaaaaggaaaaataatcacccttttcgaccaactttcttcctgcctcccccacaagcacctaggtcagattctgcatggcggtgaccactcacctgtcccaggccctctttcatctgttgcacaagggagctgtcggttttttttgttttgtttttttttttccttaggcccatttcctactttgcagagccagccccctctggctttggccagctctttgaactgatgtgtgtcctgatcttcccctgggactagccagacctagaacagggcacccagcttgtgcctggctgagttccacccgcccttgcttttctgggggagcctggctgtctggcctgtccaggcctgctctctctgaggctggtgggaggccacaatgcccgggtctctcttccctcccacagacttgccttgggaagcaccagaccggtgcctttcccacccagatctgcagccctcacatctgtgaattctgagaaaatccgcactagtttaggggtgcagttctcaggtggggaattgactgaagtacctgccttttcagggttgatcccccgaccttggcctcattagctctgtgagctgtcacaaagccacacacctcactttgtgtcacttctgctgactccctgcctgccaccctcagaggccttcttttcaattgcaaaggcgttcacaggacacaatagaacagaaagaaatcctgtctcttcaagactgctccgaaggaccagaatatgcaatttagcaggaaaataataccaaaaaaaaaggggggggacttgaaggttctagaaacattccagggcatacatgtgctgagggcacagctgtgtctcctcaaattttctatcagagattttaaaatagtgcacaggtctgtgtaacaatgtattaacacaaaacctggtgactcttctttgtgcaaaaggtgggttgtggtttgctcctaaagtgtgccgggagagcacttctgcgacagggtgcgtctgaaaattcctaagtgcttatctggggtaagttcacggtatctggagaccaaattgagggcttaccataataacaaggactcttgagtgttagctagtaggtttcgattccctggggcacattggtacccagaggacaagaggagctgtagaggagagggaaggatgctctcagaactgagcttcacaccaaggcttgcaagccagtcccagggtgcctaccagggtacgtgtgaaaaggatttcataccctagcacttgacagaagttgttaaaatctgtggcaaaatggaatgactgttctggagctgaagggatgacttattggctaagagtgcttgttgctcttcccagaggatccaagttcagatcccagcaccggtgttaggtagctcacaactgcctgtaactccagctccagggatattgactccttcttctggcctctttggatatagccccccccccacacacacatacatgcaaaaggcatacatgatacacttgtggatatgaagaaccctttcataaatgtgggcactggctgctgctttgctgtgatcacgttcctgggagacatacttcctgagagcctctcacctgtcacttcacaaattataatgggatgctgtcgctgttcacagtgagaacctcaaatgtccttctggcctcagaggtcagggactttggttgtgagcccctacattttggagaggactttttttttcatctataaaaggattggtgtctcagaagcactttctgggttatacatccctagaaaacactgtgaagagccccaaatcccttatgttctagaaggaagttatggtgttgacacacaacacagtcttcatctcagggatataaaagacagtgtagttctttttagaggacttttttatttactgggatacagagagtgtgattcagaacacagcttgtgggagtgggtccttctcagacaaataatcacattctcagcggtttacagagaaagtacagaccccttgtgcaaccccgatccattggggttatcatattcttatcagattgtacttccaaggtatccccagagctccttacttagctcacttatacagagctccttacttagctcacttataaaatgagtaaaaggatggagatggtgtcttagcaaccttgggggatgtaactcaagggctcccagcatgctgtgtatgtcaaaggctaagacagctggctgctcacactccctctgcccacctgtacccacaccctctgcccacctgtatccacaccctctgcagacctgtaccacaccctgtacacacctgtaccacaccctgtacacacctgtacccacaccctccacacacctgtacccacaccctctgcatacttgtaccacaccctgtacacacctgtaccacaccctccacacacctgtacccacacgctctgcacgcctgtacccacaccctccgcacacctgtacccacaccctctacacacctgaactcacagcctctacacacctgtacccacaccctctgcacaactgtaccacaccctctgcacacctgtaccacaccctctgcacacctgtacccacaccctctgcacacctgtgcccacaccctctgcaacctgtgcccacaccctctacacacctatacacaccctctacacacctgtacccacaccctctgcacacctgaacccacagcctctacacacctgtacacacaccttctgcacatttctttgagaagcttacacccaaactctcaggtatgtctcactgtcttgtaaacacctttctctctttcctcatgcttaagcctggatctaacaaatctccagatctacaccatgaactcgataatcctcacattctttgcagtacccagtcctgatttggcctgggttgaggtccctgcctgaaagtctaaggaattcttcaggctgctgggggtggcctaccttctacctgagacagcgtgctttcactccaacagtttggaaaacttatatcagttgctgccttgtgccctaaatttttcctgcctcccccagaggaatggtcagacttttaacaaacctcagaacaaagctcggccggaggggaaggttcatccggctctgggaagaagcccccgctgcgcgtgggtcctgattcaccgtacctcacgtattaaagtgatacagggaacatctttcaccgtcacacaaaaacctgcagcccgagtgctatcctggtcccctgaccagggttataatagggcagtgtcacagttcctcccacctttgttcctggccgacgggactgcaggccttgtgaacacccgcacgcgcgcggggagggaagctaactttggttctgattgtcttacatcagcctctggtgaagttgggcctcactgctgggcttttgccttttctctttttcatttggccagggccgcctcggttaggcagagcagacttgtcactgttagttaaaagtaattgttattgcaagccccccgtactccactgccaattcctttcatggtcaaacccggtaagcattcaattcagcagcagaaaaagcagagactgggtggaactggatccttttcctgccgaccaacagcacctgctgcaacctgctaactagcccggctcgttaattgcatgcctaacttgttgatctccacggctttgggtttttagaagcaggagaaacccaccgtgtgtctcttcccatagaaaacgacaggagtgtcttccatgctctgttcccatcactcatagtcaaatacttgcatttcctgtaacgttttgttttccttctttgtgaggagtcatttcttaagttcaaagggcctttctattcagagcaagttatatatttgcccataaaataaaggtttcaaaagcatcagtcctgtagctatgagtccgagtgggtgtgctgaagatattttctgtagttgatattactgaagagagagagaaagagagaaagagagagagagagacattaagagcacaaaataggctaattaaaagtgccatcataatgctctgccatttattgaatattcaccatgttctaggctgggtgttaaaaactttgcacttttagttttcacagcgaacctctgaggtaccaactatatatcagtgcgtcccgtggtggaaagtgaattcggaaagtattcactgcttgtctccagccccagaagaggaggtagtgcggctgagcggagggaaaagtggcttgggttcatcccgcatgtcacgggagaatcagagcagggagagaacgctggtttccttcctggacgagtgaaccttctttctgttgtagttaggaaacccagggcaggcatgctctgttcctcttacctgaaagttcatcagcaagacagctaaacaccctgatccccgccaagggtgccgtttattcctaagacaggttgtacccacccacaatggagttcttggcagtgcaattccaacagactgtgaaacactgaggcactcaagccatgctgtgtgaacaccggccagggctgccttctagaaggacagcggggtcctgtgaagaacttaagctgcccagcaccaagggctgggatgcggctcagttgaagaagagcctggcatgcatgaagctgtgggttcagtctccagctctggaaactggggctgaacttgtaatcccagtactggagaggtagaggcagggagaatcagaagttcaaggtcatcctgggttatggtgcatgttggcggccagcctgggctacgtgagaccctgtcttcaaaaattagttgggggtggctcagcagataaaggcttgctgccagatctttgggacacacacggtggaaggagagaaccaactcctatgagttgacctttgacctccacacctgtattgtggcatgtgtgcccctcccctaaaaaactatttataaaactcaccgcagcacagaccaggcacagaattggttcttcccctgcagtcagggcgaggtaattagtgacctggtcgtgtaactgcctcctttagggataggttttaaggaaattcaggctttctgtttttcgtttggcacagctttccctgcacctctggatttttcgaaacaggttacttcgcaagttaagatctagctgtgtgtgcacttcatgtcaggccaggcttacttcagtgtttgcctgttcctgtgcagaagagagccctgtgaagactcctgtcagtcatccctgaggcactcccttttcccaagtacgcgtacctgccgccagggtgcaggctctagctcagtcagttctgggttcaggctcacccaagattctttctttcttccatgtttttcgaagttagttttcgtcaactggacacaaagctgggcaaacctgagaaaagggaatctcagtagagggagctcctccattagatagtactgtaggcaggtctgggggcgaggggtggggggtgggggtgggtgggtgtgggggcatttcctttattgacggagggcccagcccactgggcagtgccatcctggacagatggccctgggtgctgagtaaggtatggaaagtgagacggtaggtagtgttctctgtggcctctgcttcagttcccgcctctaggtctctgccttgagtgtctgccctggccgcctgaactcttctctctcaagttgcttttggtcagtgtttcatcacaacaacagagaatcgacctgcacagacagtgtgtgtgtgtgttcatatgactgtggtgtgtgtgtgtgtgtgtgtgtgtgttcatatgactgtggtgtgtgtgtgtgtgtgcatatgactgtagtgtgtgtgtgtgtgtgtgtgtgtgcatatgactgtggtgtgtgtgtgtgtgtgttcatatgactgtggtgtgtgtgtgtgtgtgtcatatgactgtgtgtgtgtgtgtgtgtgtgtgtgtgttcatatgactgtggtgtgtgtgtgtgtgcatatgactgtggtgtgtgtgtgtgtgtgcatatgactgtgtgtgtgtgtgtgtgtgtgtgtgtgtgtgtgactgtggtgtgtgtgtgtgtgtgcatatgactgtggtgtgtgtgtgtgtgtgttcatatgactgtggtgtgtgtgtgtgtgtgtgtgtgtgtgtgtggcatatgactgtggtgtgtgtgtgtgtgcatatgactgtgtgtgtgtgtgtgtgtgtgttcatatgactgtggtgtgtgtgtgtgtgtgcatatgactgtggtgtgtgtgtgtgtgtgtgtgtgcatatgtgtgtgtgtgtgtgtgtgtgtgcatatgactgtggtgtgtgtcgtggatctgtggtgtgtgtgtgtgtgtgttcatatgatgtggtgtgtggtggttgtgtgtgtgtgtgtgtgtttcctgtggtgtgtatgtgtgtgttggtgtgtgtgtgtgtgtgtgttcatagaatatgactgtggtgtgtgtgtgtgtgtgtttctttgtgtgctgtgtggacatatgactgtggtgtgtgtgtgtgtgtgtgttcatatgactgtggtgtgtgtgtgtgtgtgtgtacatatgactgtggtgtgtgtgtgtgtgtgtacatatgactgtggtgtgtgtgtgtgtgcatatgactgtggtgtgtgtgtgtgtgtgtgcatatgactgtggtgtgtgtgtgtgtgtgcatatgactgtggtgtgtgtgtgtgtgtgtgtgtgcatatgactgtggtgtgtgtgtgtgtgtgtgtgtgtgtgtgtgtgtgtgcatatgactgtggtgtgtgtgtgtgtgtgcatatgactgtgtgtgtgtgtgtgcatatgactgtggtgtgtgtgtgtgtgcatatgactgtggtgtgtgtgtgtgtgtgtgtgtgtcatatgactgtggtgtgtgtgtgtgtgtgtacatatgactgtggtgtgtgtgtgtgtgcatatgactgtggtgtgtgtgtgtggtgtgtgtgtgtgtgtgtgtgttcatatgactgtggtgtgtgtgtgtgtgtgtcatatgactgtggtgtgtgtgtgtgtgtgttcatatgactgtggtgtgtgtgtgtgtgtgtacatatgactgtggtgtgtgtgtgtgtgtacatatgactgtggtgtgtgtgtgtgtgcatatgactgtggtgtgtgtgtgtgtgtgtgttgcatatgactgtggtgtgtgtgtgtgtgtgtgtgcatatgactgtggtgtgtgtgtgtgtgtgcatatgactgtggtgtgtgtgtgtgtgtgcatatgactgtggtgtgtgtgtgtgtaactaacatgactgtgaagatgtaacatgtgatgtgcaatacagtagaatcacaatgaaaaatgtggtgttgctgtgtgtgtgcatgatgactggtgctgtgtgttgtgtgcatgtatgatgtggtgtggttgggtgctgctatgatgtggtgcatgatgtggtgtgtgtgtgtgtgtgtgtgtgtgcatatgactgtggtgtgtgtgtgtgttcatatgactgtggtgtgtgtgtgtgtgtgttcatatgactgtggtgtgtgtgtgtgtgtgtgtgcatatgactgtggtgtgtgtgtgtgtgcatatgactggtgtgtgtgtgtgtgcatatgactgtggtgtgtgtgtgtgtgtgtgtgtgtgcatatgactgtggtgtgtgtgtgtgtgcatatgactgtgtgtgtgtgtgtgtgtgtgtgtgcatatgatcgtgtgtgtgtgtgtgtgtgtgcatatgactgtggtgtgtgtgtgtgtgcatatgactgtggtgtggtgtgtgtgtgtgtgcatatgactgtggtgtgtgtgtgttgtcatatgactgtgcggtgatgtgtgtgtgtgtgttgtgctgtgcatatgactgtggtgtgtgtgtgtgtgtgtgcatatgactgtggtgtgtgtgtgtgttcatatgactgtggtgtgtgtgtgtgtgtgttcatatgactgtggtgtgtgtgtgtgtgtgtgttcatatgactgtgggtgtgtgtgtacatatgactgtggtgtgtgtgtgtgtgtgtgttcatatgactgtggtgtggtgtgtggtgtgtgtgtgtatgctgtaatatgtgtggtgtgtgtgtgtgtgcatatgactgtggtgtgtgtgtgtgtgtgttcatatgactgtggtgtgtgtgtgtgtgtgtacatatgactggtgtgtgtgtgtgtgtgtgtgtgtgttcatatgactgtggtgtgtgtgtgtgtgtgttcatatgactgtggtgtgtgtgtgtgtgtgtgtgtgtgtgtgttcatatgactgtggtgtgtgtgtgtgtgtgtacatatgactgtggtgtgtgtgtgtgtgtgtgttcatatgactgtggtgtgtgtgtgtggtgtgtgtgtgtgtgtggtgttcatatgactgtggtgtgtgtgtgtgtgtgtgcatatgactgtgtgtgtgtgtgtgtgtgttcatatgactgtggtgtgtgtgtgtgtgtgtacatatgactgtggtgtgtgtgtgtgtgtgtgttcatatgactgtggtgtgtgtgtgtggtgtgtgtgtgtgtgttcatatgactgtggtgtgtgtgtgtgtgtgtgttcatatgactgtggtgtgtgtgtgtgtgtgtgtacatatgactgtggtgtgtgtgtgtgtgtgtacatatgactgtggtgtgtgtgtgtgtgcatatgactgtggtgtgtgtgtgtgtgtgtgttgtgtgtgtgtgcatatgactgtggtgtgtgtgtgtgtgtgcatatgactgtggtgtgtgtgtgtgtgtgtgtgcatatgactgtggtgtgtgtgtgtgtgtgtgcatatgactgtggtgttgtgtgtgtgtgtgtgtgtgcatatgactgtggtgtgtgtgtgtgtgcatatgactgtggtgtgtgtgtgtgtgcatatgactgtggtgtgtgtgtgtgtgcatatgactgtgtgtgtgtgtgtgtgcatatgactgtggtgtgtgtgtgtgtgcatatgactgtggtgtgtgtgtgtgtgtgtgtgtgcatatgactgtggtgtgtgtgtgtgtgtgtgtgtgtgtgcatatgactgtggtgtgtgtgtgtgtgcatatgactgtggtgtgtgtgtgtgtgcatatgactgtggtgtgtgtgtgtgtgtgtgtgtgtgcatatgactgtggtgtgtgtgtgtgtgtgtgtgcatatgactgtggtgtgtgtgtgtgtgtgcatatgactgtggtgtgtgtgtgtgtgtgttcatatgactgtggtgtgtgtgtgtgtgcatatgactgtggtgtgtgtgtggtgtgtgtgtgtgtgtgtgtgtgtgtgttcatatgactgtggtgtgtgtgtgtacatatgactgtggtgtgtgtgtgtgtgtgggtgtgtgcatatctggtggtgtgtgtgtcgtgtgcatatgactggtgtgtgtgtgtgtgtgtgtgtgtgtgcatatgactgtggtgtgtgtgtgtgtgcatatgactgtggtgtgtgtgtgtgtgtgcatatgactgtggtgtgtgtgtgtgtgcatatgactgtggtgtgtgtgtgtgtgtgtgtgtgtgcatatgactgtggtgtgtgtgtgtgtgcatatgactgtggtgtgtgtgtgtgtgtgcatatgactggtgtgtgtgtgtgtgtgtgcatatgactgtggtgtgtgtgtgtgtgtgtgtgtgtgtgttcatatgactgtggtgtgtgtgtgtgtgtgtgtacatatgactgtggtgtgtgtgtgtgtgcatatgactgtggtgtgtgtgtgtgtgtgtgtgtgtgcatatgactgtggtgtgtgtgtgtgtgtgcatatgactgtggtgtgtgtgtgtgtgttcatatgactgtggtgtgtgtgtgtgtgtgttcatatgactgtggtgtgtgtgtggtgtgtgtgtgtgtgtgtgtgtgtgtgttcatatgactgtggtgtgtgtgtgtgtgtgtacatatgactgtggtgtgtgtgtgtgtgtgtttcatatgactgtgggtgtgtgtgtgtgtgtgtgtgtgtgttcatatgactgtggtgtgtgtgtgtgtgtgtgttcatatgactgtggtgtgtgtgtgtgtgtgtgtacatatgactgtggtgtgtgtgtgtgtgtgtacatatgactgtggtgtgtgtgtgtgtgcatatgactgtggtgtgtgtgtgtgtgtgtgtgtgtgtgtgcatatgactgtggtgtgtgtgtgtgtgtgtgttcatatgactgtggtgtgtgtgtgtgtgttcatatgactgtggtgtgtgtgtgtgtgtgttcatatgactgtggtgtgtgtgtgtggtgtgtgttgtgtgtgtgttcatatgactgtggtgtgtgtggtgtgtgtgtgtgtgcatatgactgtggtgtgtgtgtgtgtgtgtgacataatgactgtggtgtgtgtgtgtgtgtggctgtacatatggactgttggtgtgtgtgttgtgggcatatgactgtgtggtgtgtgtggtggtgatgtgtgtgtgtgttgtgtgttcaaatgatgtggtgtgtgtgtgtgtggtataatgactggtgtgtgtgtgctgtgtgtgtaccatagactgtggtgtgtgtgtgttgtgtacatcatgactgtggtgtgtgtgtgtgtgatatgagctgtggtgtgtgtgtgtgtgtgtgtgttgtgtgtgttgctatgactgtggttgtgttgtgtgtggatatgactgtgtgtgtgtgtgtgtgtgctgctgtgcatatactgctggtgtgtgttgtgtgtgcatatactgtggtgtgtgtgtgtgtgtgtgtgctggttgtgtgcattgatgtggtggtgtgtgtgggtgcatatactgtgggctggtgtgtgtgtgtgctatgactggtgtgatgtgtgtgtgcatatgactgtgtggttgtgtgtgtgctgtgcatatgactgttggtgtgtgtggtgtgtgcataatgatgtggtgtgtgtgtgtgtggtgtgtgtgtcgccttatgactgtggtgttgtgtgtgtgtgctgtgtgtgtgcatatgactgtggtgtgtgtgtgtgtgcatatgactgtggtgtgtgtgtgtgtgtgcatatgactgtggtgtgtgtgtgtgtgcatatgactgtggtgtgtgtgtgtgtgtgtgtgtgcatatgactgtggtgtgtgtgtgtgtgtgcatatgactgtggtgtgttgtgtgtgtgtgttcatatgactgtggtgtgtgtgtgtgtgtgtgttcatatgactgtggtgtgtgtgtgtgtgtgacatatgactgtggtgtgtgtgtgtgtgtacatatgactgtggtgtgtgtgtgtgtgcatatgactgtggtgtgtgtgtgtgtgtgtgtgtgtgtgtgtgatatgacatatgactgtggtgtgtgtgtgtgtgcatatgactgtggtgtgtgtgtgtgtgtgtgtgtgtgtgtgtgtggtgtgtgtgctatgacatatgactgtggtgtgtgtgtgtgtgtgtgtggtgtgtgtgtgtgtgcatatgactgtggtgtgtgtgtgtgtgtgcatatgactgtggtgtgtgtgtgtgtgcatatgactgtggtgtgtgtgtgtgtgtgtgtgtgtgtgcatatgactgtggtgtgtgtgtgtgtgtgtgttcatatgactgtggtgtgtgtgtgtgtgtgtgtgtgtgtgtgtgtgtgtgtacatatgactgtggtgtgtgtgtgtgtgcatatgactgtgtgtgtgtgtgtgtgtgtgtgtgtgcatatgactgtggtgtgtgtgtgtatgactgtggtgtgtgtgtgtgtgtgtgtgtgtgtgcatatgactgtggtgtgtgtgtgtgtgcatatgactgtggtgtgtgtgtgtgtgtgcatatgactgtggtgtgtgtgtgtgtgtgcatatgactgtggtgtgtgtgtgtgcatatgactgtggtgtgtgtgtgtgtgcatatgactgtggtgtgtgtgtgtgtgtgtgtgtgcatatgactgtggtgtgtgtgtgtgtgcatatgactgtggtgtgtgtgtgtgtgtgtgtgtgcatatgactgtggtgtgtgtgtgtgtgcatatgactgtggtgtgtgtgtgtgtgtgcatatgactgtggtgtgtgtgtgtgtgcatatgactgtggtgtgtgtgtgtgtgcatatgactgtggtgtgtgtgtgtgtgtgcatatgactgtggtgtgtgtgtgtgtgtgcatatgactggtgtgtgtgtgtgtgtgtacatatgactgtggtgtgtgtgtgtgtgtgcatatgactgtggtgtgtgtgtgtgtgtacatatgactgtggtgtgtgtgtgtgtgtgcatatgactggtgtgtgtgtgtcaggccagtgtcagtactgggttacagctgtgctctccctgcctgggttttggccgggttctggggatctgaactccggttgtcacatttgcccagtaggccctttgctgcaggcttgtgaagcgtttgccacctgcagctggccctctccgtccaagatccatgtttagtttcttcctcagcagtagccatcgaagcagctcgctctcccacttcctgctcaagctgccacgccctcagaggaggaagcaggaggtggtgatgaaagacactcacccagaagcaggaagcaggtttgcatgctcgcagtacattgctggaggatgtgatcttgggatcctcttgcttggggtctttgaggagcaggccagggtcccccctaaacagggagggaccttctgtgcccagaatgtacgtcactcactgtttgcttctagtctgcttcagatcacgtggatccctgcgtcacggttgattgagactcaccttgtgaaaagtgaccatgcaccagtacactttgagtggcatttgtggggtgccactggagctcagaccttaggccagccagagcagaggacgccccacctttgtcttcttgttctgattagctcctcagacgtgtttccttctcctgtgggctatcctgtggaaggttctccctccactcgggtcctgggcttgaactcaagttgtcagggttagcagcaaatgcctttaacccactgagccagtttgccaacctgatttttgttcttttgggggggacagggtctcatgtagtgaagaactcactatgtgtctgaggctggtcttgaactcctgatcttgcttccagcaccacttttaaattctgggattacaggcatgtgccaccatgaaacagtttgccttttccccggttctgggtgttggatttgatggcttgctggtcctgatgaggggcagcctaggggagtctggcagattagtgaaaacccaggagagctccactctgactcctcatgcctttctcactggggatgttctatggaagctgagtcatttctccctcagtaacccatgctggcttctgaacttgaagatctgtgtagtacttactttaaaacgtatttatttttatttcatgtgtacgagtgtttgtctgcatagatgtctgtgcaccacacgagtgcagtgcccatgcagttggagttgcaggtggttgtgagccaccatattgatgctgggaacagaactgggtcctcagcaagagcagccagtgctcttagcgttaagctgccgctccagcctgcaatcttaccttttttgtgtacagttaagctaaaatgtgataactttctactctttactcgaggggctgggctgggctttggtttcagatgctcttcagtgttttgggaggcatgggattgagacagggtctaatgcagcagcctggccttgaaccgcctctgtagccgaggataactttacattcttgatctcattccctcagcctcccaagtgctatgattagaaagaaacacaagccaccaggacccagcatcttcggtcctaagggtgaggtttgggggatagtttattgagaaaagttactaactttcatcaaactgtcaaagaagtaggtctaagatctgttttttcctacaagataaaaatgaattgtaaagatggcttttgaattggcttgcttatgagggacttctcccggttgtaacccacgtccgggaggaatctcgagtgtttcttccttggctgaacggccactgcctcttcggcagcccttggcatcactcctcaggccacaccacttgccaagtgctgacatgtcacttcactgttgtgtctgagtgctctctgacctttcctgcctccgtataaaggccagcagccagctcctaagcctgtggctcttctctgtcaccagaagtagagtcagagcctggggccttcagagggaggggcccatggtggttcaaggtggaggatctgctccactaaatcagtgggttcctttcagaagcttgtaaacttggtgtgttgatgtatgtctcaacatcaagacgtgtttttctcctgcgtgtcttccacccagtccctggagtcaggcgctgccttgtgagctgtggtagtgagcttagttctctggtgatatgcctggatcacattctgcatcagggaggagtatggttcctgggctgctgagaagcagtgagatgttgcagtgtgggatgcataagctctgaaggattgtgagcctctctgctaggaccagcccttctgggctgcagaggtggttgaggagggatgacagacactgcagcagtggacacccccccagcaggaggaggagggtgacactgcagcagtggatcccgaagcagcaggaatgtgctcagcatcagcctgttcctggtgacagtttgtcagtgcgttttacagattttgctctgactctgtactttacaaaattgttcagatttagaataaaagcatttattttttattagtgtgtgtgcgcgtgactgtgagttcgtgtgtgtcacatgtttgcagatgtgcagggaggcgggaagaagatgccacattccttggaattagtgttacaggcagttgggagctatctcaagttcgggttttgggaaccaaacctgggtcctctgcaagagcaatagattattcttaaccaccaaaatttctctccagcacccaaagttaaattttttatagtatgttgtttaatgcagtagcttcaccatttttgaaagacctttggctacatacacacacacacacacacacacacacatagagtagattctcacacataggcaagcgcatacacacacacaccctttctcttgcatgcatgtacacacacacacacacacacacacacacagagagagagagagagagaagagagagagagagagagagagagagagagagtagcttcttacacataggcaggcgcatgcacacacatgcacccttgttcttgcatgcatgtacacacacacacacacacacacacacacacacacacacacacacacacactctagttcctagaaatcaggaggcatcacttccctgtcctttgagagagacagaaacatcccatatgcactctgagcatagtgttgtttgtcacctggtgctaccagccccacactgtgccctgacaccccttcatgggctgtaacaatttgagttcactgatttctgacgattcttagtaaacaccagaaaacaggacagacaagagtttgacatttgcagactgctgaatacaatagtccaggtgatgcacccttggtctgaccgccatgttgagcgttgatcactgttttccaagggccaaacatggtgtaaaccttcttgggaaagatgcgtttgcggggagtcagggaaggtgagccttggctgagcctagatggcgtctcttactatctaaccaaatgtgctgccttgagtctgcctctcaccactaccgattcccttttgtgtttttaaggaaagaaggactgtcaaaatgtggacgatgcaagcaggcgttttactgcggtgtggaatgtcaggtaggtgcgggcccgctggcaggaaggccttctctcctctggaggttgggacctgggtgtcatctttgtcattggtttcctgctccacagctccccactacattgggagtgtgtgcacgcacctctcagaagtaaccagcccctgtgtcaggcagaagtgtggcatagtgggaaagacacaagaagatgactagattagctggggagtgtaccacagtgacagttcacaccaaagacaccatcagccaagctggggacttgtagagaagtatgaagtagaaagctgccttcgtggcatgtgcagtcaatcctacagcagcagggctcctcacgcttgggctgttcgaaccctgcttcatggcagctgggctccacccctagcacagcatggcacagcagagggttgtggctgtgaacttgaacagaaccagcgtgggtcttgtaagcagcctgagttgggaaggtgaggagttgtctcctgcagtgagacactggagaggcaagggggcaggctgctgtgacctctcagtgtccttctgagggactgagaagggtgtcccctaacttagagcaaacatccgatgccccccaaaacgctcttcatagaaaagcattgcagggccggtgcaggggacacgtgtgctcttacttcacagcctggtccaggcctccagcatggggtgtaccaggaacttaaaaaaatgtgtgtttgtgtgcgatgcatgtttgttctcacacgtgttggtgcacctgtgagtacatgcatattgaggtgtctttcttgattgctttctatttattgaacctggactcatgggttcagctcgtctggctagcctgcctgtctctacctctctctcaagtgctggaattacagactggcaaccatgccagctccgcttttaacagggcgtgtgaggcaagagctttttctctccacaaagccctctcctcagccctgcagggaaaatttctgtcctcctgtttgacctgcacctccccccacgcacccctgcccagccttgcggctttctgttctttttcttcaggaacttcttaccacgccttagcaagcactcatactgtttgggggggatgaatggttctaggtgatctgtaccccctgtcccaaagcaccctgcaagcttcacttctggtgactgttcccccctcacttcctcagagaacacttaccaatgggagccactgctaaggcctgtgacagcagagtgccagggacaacagccccttgccagggtagagcagacactgagccttgactccctcagcaggcttcctgaggtggccagcctgagtgacagtgaacatagaagtgagctttggtccagtttccagggcccatccatatctctagatgctctgatctctcgtgggcggggcactctgtgcttagattgctgtggtgtttggtttttctctttttttatcattttttaatttgaattagaaacaagattgatttacatgacaatcccagttcccttctccctcccttcctcccctaccacccccccaactaaaaccctacctgtcatatgtcctttcttctaatctacacctgactcaacctttctgctccctcatgacctctgcatccttcctcttctccccttctcattctcgtagctccctcccccccttcccatgctctcaatttgctcaggagatcttgtccctttccccttctccaggggaccaggtatgtctcttttagggtcctccatgttactagcttctctggaggtgtggattgtaggctggtaatcccttactctgtgtctaaaaatccacatatgagtgagtacatatcatgtttgtctttttgtgactgggttacctcactcagaatggtttcttctagttctatccattttcctgcaaatttcaaaattccattgttttttcccactgagtagtactccatttccgtggcgtttgggagatactcacatgactgtctctgtaggaaaagtaactcattccctcctggtctttttctaagcaagcatagtcagtggtgtgcagtccagatgaaagagcaggaaataaggcaggtccaagtggcaggtcctgagtcccacttacaagctctcagagcctggcaggtcacaggacagctctgagtggacactttcttcaagttcaagtgaggacacagtgcccacagtaaagagtgggaaggagaggcctgtgtaaatggtgactgtagactgaggtttctgtcctaccaggtcccgccacccttcagccccaaagagacatattaattattaaattgttggctgatggctcgggcttcttactggctagctctctcttaatcattaacccataactactcatctatgtatttctacatggttttatcttaccggataacttctggcaacctgtcttcctggtagctacttggcggtctcttttgcagctcttctccccagcactcttctcctccagttgccccgcctatacttcctgcctggctactaaccaatcagcattttattcatcaatcaataagagaaacatagatacagaaggacatcccccgccaggtaacaccctggacaagcatgtggctttgttataagtgatattagactccatggcaaagcagattttctgtgattcaggtggggtagaagctgagctgtgtgtagcggcccaagcctgggaagacgaccggcttctgagattgccagggctctggtcgtgtgcagtgggtgaatggtggtcagtactggggagtcaaccttctgagacattgagaacagattcagcagcagagaatctcaaaacccgtgacatgctgccttgctcccacacccccggggcacactgacaaaaatatatttccatacgtcttagtaggtggcaatatttcaatgagtcatcccaatgtgcattgggattttgaggtggcactgtggttcctgatgctctggtcttccaggtttgcagactccaaaagctcatttggagcaggctcacattaattcatgtctttgctggaatgattgctctccctgaagcactcagagtttgcacagtcagccgctgaaggccggctggaaggtggctgtgtcatagtgagatagtaggggaggagcccgggggcgggggcagagtagccaggctgtgatagcccctgacggagctcctggtccctcactctgagaacgaggtgcctggggacagcttctgcagctgtgaatttctgtgtcacatgaccaagtatcctcgtaggtgacacctgtggcagactggatttacctaaatttctcctcctcctcctccttcctaccttccttcctgcctgccttcctccctctctttccccttccctccctccctctctccctccattcctgcctccttccttccttccatccttccttccttccttccttccttccatctcctgaagaggccatggccacaaggctttcaacctttactaatgaacaagtaaatgattatggggtcgtgtattgtagcagaatggccatgagaagttaggagaaataaatgcctggaaacggagggcagtgccagggctgaggttcaggaagtgtctggcccagtgctgctaggaccctgtcattgttggggaggccatggacggggccagggtcctgggtccattgctggcgaagctcactgtcgcctcttagccagtcctgagccgcagctgtgccatcaccactctgctctctgactgtccaccatcagcactaggaagaaaggtgtgtggatggcgctgagtacatctcttctctgctgggagtgcagaaccaagcgctgtgaccctgacttcagggctcagtggctccagggtccatccgactccctcccactcttcttcctggctatcatgacaggcagagcagaagccctgtggcttattcttgctgctctgcatcttaagtctcagctgcatgacgtgtgcattttgaaaagtctattagaacagtggacaccccatgccccagagacagaaaagggggcagaagtctagatacctcctccaagaaggcagacccatttgctcagcagaaaatgcgatgctatagtcaccgctccttttccctcattcacagtgtgggtgctccatgagacagtcctccactcacagtgtgggtgctccatgagacagtcctccactcacagtgtgggtgctccgtgagacagtcctccgctcacagtgtgggtgctccatgagacagtcctccactcacagtgtgggtgctctgtgagacagtcctccgctcacagtgtgggtgctccgtgagacagtcctccgctgttactcctgcacagcgatcagtctcacccagtgtttattgtattggaggaaaacaaacttgaagtttaaaaagaactgtgagcacagaaaccggccatgtcttactgttgcactggtgctttagtttatttttaccagcagtgtatccattactgaaaattcagaggtacgatggggacatagaagttaaggcagagggagtagtttgaattttgaggggataagaaagcagttttagggggaatcttataaaaactgagagtatttttcaaagaatacacagttgcctttttagccttttttgcacatgtattttttattatgtacagaattatggcagatcacctccgatagaagagcgtgctcttggtaaaggctacaagtagagcttgtggggctgtggctgctcatgcaagggtctgggttcgttcctggcaccgtgagaatcaagctgtatgtagctcgcctgttctcatagctcttgggtggggtggcaagagttcagggccagccatggcatttgtaggagttctagacccacctaggctacatgagacttcatttcttaaaacaaagaaaaaacagggaaagcaagcaaacaaacaaaagtgctcaaagctatctgatgcttctaccagattctatttctcctttccttttcacaaagttttactttttaaaaaaatacgtatgggtattttcacctgcaagtatgtctgtgtcctgtgttagtgcccggtatccgtagaggctagaagtgggtgtcagattctctggaactagagtcacagatagttgtgggcctccatgtgggtggctggaaattaaactggggcctctagaaaagcaatcagtgctcttaaccacggagccatctcttcaggccctaatttttttttaattaaaaatgaacaatgtcattggagtacatatctgtcattcttcccttaatccatgtccagaaggaatgccaagtgaaccaaagtcaattctaaagcccattggtattaccgaggcaaacctagcttgatgcggccaaagttctgtctctttgtgtcctccattttacttcctgttctaacatggtcataggctacttgaagtcaaacactctgcgctccctgcttctggcgtcagcagcaaggctgacttcatgactaacactgattacaaatggacatgggccaggcttcttgcttcttgtgtgttggcatctgggattgactgtgaagtacctggtctgtgtgagccaataccaatggtccagtttgaagggccttcatgctccacaggctttggtccttggtccgattatcactgttggaaggtgtgaaatcacagactcagaattccagacctgctaagtaacggggaggatcatgttatttacagcctagcagacaggtgcacagggattaggaggcctgcatggcctcccttagtagctgcagagcagagtccgaatgggggcctctgagagtcctaggatggtagccatcctgttccagggcctctgcttcccttcacagggctccatttggtgagcttctcttcccttggaaggtagaccgatcatagaagtcagtgtgatatattattcatgtgagcactaattttaaattaattatttgaataaatatgctatattgatacaattgattaaatttgataaacattaacacttcacttttttctcctgggagcttatgcctgggagagataccaagccctcttcacagttgaggaaaccaagtgtagagatcctgggcttttgaagacaggttgctctctgtagccttggttggcctggaacttattctgtagaccaggctggcctcgaactcagatccacctgcctccctggtgctgggattcaaggcgcacaccaccttgcctggctggagaccagggtttttcaagcccctggagtttcagtgggcacttgcttgtcccctgtcctacctgctggtgctgcttttcctgacttgccacaggcctcctcgtccctttctctgtaccctgtggccacccagactgggcagcagtctgctgggcccgttccctcctctgcctcttcctcgggctccgtggtgtagcctccagctaaaaacagctcctgtgctcccaggggtatatcttatcctctctccctgctctcggttatctcgggcacggtgttatttaactccacacagcatcttggcacagaacttgagccccggggatctgtcagacgcctcagtaaatcatgaggatggattttgtgtctttcccttggggttctgtagaggagagggacaggggcgggggacactcagccagcagctctcctgatgccttaggaataccaggcttgggtgtaggacctggggtcccacctgtgaataaagcagaggcgatgcctctgttctaacgggggctaattatgtcatatgccggcagtggggagaactcagataaaaaaaatcgagggaagggagtgttgggtgaaagccttgcttggtgcaggttgcttgagaaggtgactgtggaagaacagaggtgtggagacccgggacagccagggagccatgtgacaatctgggaactagagctagacagcaaatactgcaggggcccaggattttgagagagggaacaggaagggtggtgctatgacagcttagtcaggagagtgtggaggaacaaaccctgaggactcccgtccccacagccttgcaaggtgtggtgagaacttgattttgtgtgcaaggtgagaagtcatcaagggttctgagctgagacctgagttctagttaagagtgtccctctctccagtgttcaggaggccaagggcaaaggtatgcatgcagctgaaggaatgtggcggtaatcttggcagagctggttggatggctgatcctggtggcagagagatgagtctctgcaccccactcactccccatctgtagaggcgtgtatgtgtattcatgcatgtgtgtgtgtgttgtagacgtgagaccagctttgtgtgccattctttatgagttgtccaccttgtgtttttcagccagggtctctctctggcctggggctagctggttaggctgagctgcctggccagtgagtccccagggatcctcctgtctctgcctccccagtgctgaaattacaagcacaccacctcactcagctttttttaaataagggtttttgggctcaaactcaggtcctgttgctaccaggatgacttcagatgtttgctgtaggcttctgaaagaatggacatgctgcttcctgagctggggaaggcagagagcagagccggggcctaccagttctactgagcacaagagagtgttccaggcttctctaagcacacaagcatctgacggtttttccactctcccccagctcttcctcctgggctcttattcctgccactgtggaggtttcctttctgttgctgtgataaaacactccggctaaaaggaaactggagaggaaagggtttatctggcttgtttgcatcatagaaggtagtcagttcaggactcacagcagaagccttggagggaagctgctggttggcttggtcaggctttgctcagcctgcttccttccttatctagcctaggcccacctgcctaggggatggtgccgccctcagtgggctgggccctcccacatcaatcagtcaagacaccctcttacaggtcaatctgggcaaggcagttcttcatttaaagtttctgtctcagatgactctagtttgtgtcaaatttacaataaaaactaaccaagatggctgcttttcttgactctgattcttctgggagaagctaccacattgttatgttttttgtttgtttgttttgttttattgggttttttgttttgtttttgttgttgttgttgttttgttttgtttttggttttcgttttgaaaccagtcagtagtgatattgtggtgactggtgagtttccagtcgtcttccatgtgcctgtcagcagcctttgtgctgtcgtttgctctcacccccaaaggacttaaaacaccactgtgccctcctgccacctctcccctctccatggaggtgttcccacccctcctcagatgactggagtcttcacccccctaccaagggcagaaaggctgcaagatgagataggaagaaatatagttgctctaataaaaagtaattctgaggaagccgggcgttggtggcatatgcctttaatcccagcacctgggaggcagaggcaggtggatctctgtgagttcgaggccagcctggtctccaaagcgagtgccaggatgggctccaaagctacacagagaaaccctgtctcaaaaaaccaagaaaaaaaaatctgagggacctgtgtcatcaggtccccaatagatgcctttgctggactctgggtgcatgacagacccccagttgttcaaagtggccgagagagagttgtcagtgatttgtcttgccttgagaccagagctggaaatccagcagcacatagacctattgcccagcgctcctgccctggtgagtctcagctcacacagacttccagacaggagcagctgaggaagaaaacaggaaacattcaggtatggcagctcatgctcgtaatcctagcactcaggaggcttgggcaggaggattgctatgaagataagtctattctgggactacatagtgattcaagaccagcctgagcgtgagacccttaaaaaatccccccaaaccaacaagaaacaccttggctgagctagaattacagttagaggattgtgtctgtctttacaatatggtgttggctctagtctgtgagcattcccgagctttccaagaggaagtgtgttctacttgaccttaactggggtcttactgcagctttcttcatactttagtctgtatttgtgtccgtatttttttttgtgtgtgtgtgtgtgtctatgtctatgtgtctgtatgtgtccatccgtgtgtgactgtgtatctatgtctgtatctctgtgtgtgtgtctatatgtgtatgtatatctgtgtgtgtctgtctgtgtctgtgtgtctgtatgtctgtctatctgtgtgtgactgtatatctatgtctgtgtctatgtgtgtgtatatgtgtgtctatctgtgactatgtatctctgtctgcccatccttttgtgactgtgtcaatgtctgtatctgtgtgtgtgtgtctgtctgtctgtctctgtgtggatatatctatacattgacagttttgttttataacacctgcccagaaagaagactggcctctgcacaagctggagtgctcatccatggttgtttttggggagaactggaatccttcggagacggtgcggctcacagcaaggattctggccaaacaggtgaggaaattcgataatatttggctgcatcggttttcattaaaggtcagaaagatgagtggctgagccgggctgagcatgtggttccatattcttggacttcagctccagtcacatccatgaggagcagagggctctcgggtgagtagttagcactcctgggcagttagaacgttgcttgccccagaacaggacatagccatactgattcaagtcagagtttcttggggttcacagaaaagtatcgccatgactttacttcatggaagaccagacctggccagaaattcctagagcttcttgtgagccgggagggtcagggaacctctgtgctgtgtgggtacattctgtcccctgcttgtatgtcgccctgctcctcatcaactgtttgtcactgcgtggccagtccttcccaaacacttgaggatgcatgccttgtcggtcaaggcctgggttttgaagtcagtgggaagacttaaagggcttgtctttgtgacccactgaaacattagggcgctctggaggcagcatgtctggagggtggaggtcttgctgtctgtgtcagcctctgagctgtagattgcttcaagctcacactgcatccacctctgcctcttctcccagcacctcccagttggtctgttgttgttttattctaaggtgagtatgattataatggctagctagcatgtgcctgtccccagatcaaatttaggatcctgggtgtgtgagaagaagtggaacattctagaactctgaggtcatcttcccactgcgttcagctggggtcaggtgactgaagtgactctctgtccctgagtaagtggagcaggaaagacagggggaagagtggctttccctggggaaggccacctgcctcttcctaagtgacagttcactgtgaactagtggtctgtggcagacagaggaacaggggagtggtgtgaatggtgaggtctgggggtaaccagtcctttattgcatcaagccctgcccactggaagaacactctcttccttccctcagccctcccagggtctctgcagtgatgtcctaagatcccagaggagctcatattttttcctgagtgaggtctgtctcaccccctgtacttctacccccactacccccttcctcccccaccacaatgacttcccacagaagtgtgcccgtgactgtctgctctgtctgagtgctggggtgggtttagaggttccctttattttctgttataattaccactaatcgactagtcaatgaaaagttacctgtccttttcatctccataggaataggtgattaaaaaaaaaatagatcatttgtattctagtagcttgcaaaggattaggggagatgggctaccaactacccaggggaagcttaacatgttaactagggaggtgagagcgccctgctagaccaaccacctgtatccccaaattgaatggccagattacaaagcccaggcctcaggccagctcctgagccctgcctttcaactcttgtcaacaccaagtttattcatgttctcaaagcctcatgggttcactattgttagctcctctcagggcgtctagaacaaaggaaacaggcgtttcaagtgtggctgggcttgcagatacaacccaaagtgttccttttgaaatgtgggatttgagatcgttttagcctatgcttaaagacagtggaaaatggatggggggttttcattttgttctctttcagaaggagaagcaataaataggatggtttgtctgtagacgcagcccttttaagtcgggccctaaaaagttgttttctggccccgttcttttcggtaatgagcatttcccagcctactgtgtgtgcagcgttgtagggcattaggggtactgcttctaaaacaagcccctttggatctgggggtcgggcagactcaagccaaatgtgggctccttgagtagcgttcttcttcgaacatggttgtgttgtcttcacttggacatagcaaggggagtgctgtgtttgaacccaggcgttaacatttctctttgatttttgtcaccaattactagaaaatccacccagagaggacgccttcagagaaactgttggctgtgaaggagtttgaatcccgtaagtatgtctctaatagatactttttaaaaaaaaaaatttagtcacaaattcagtgcccatcaggcagattgaaggcagaaatagttcattctctctctctctctctcttttttttttttttttggtttttcgagacagggtttccctgtggctttggaggctgtcctggaactagctcttgtagaccaggctggtctcaaactcacagagatccacctgcctctgcctcccgagtgctgggattaaaggccatgtgccaccaccaacgcccggctagttcattctcttactaatgatttttaaaattgtattttgtacttgtattttgacttatgtactattttgaaatatgttcctaacattgtttctcccctgagtttacaagtttatcaggaagtgatgcaggatcacacagtgatcctctctgctcctgccatgttgggtgtttttgagtgttagctggtctgtggtctggaaaaactgatgtccgtgtgtgcacccatgtgctgtgcatatatgcaggtgtttgtgcacacttatacaggtttgtgtggaatccagaggacagacttaggtgacacagtttaccaactgaactatttcttcagcccccaggtgatggccttaccaaaaggccttaaattggggctgcccaactgcttggcggtggcccagatctcagggtccagtaagggaccctgtattaagaaataaaaggagcttgggataaagatattctttattagaaaaacaccagccaaacacaagtcagagtgtgcccaaggcagccaggcagcgagaccagagagaagggctctcccatgtgctcgatgtcccttaagagcccatcccgagtcatcctgacctcaccttgaccacgccttgacaggcatggtcaggcacacctgtagccagcctctaacaggcgtggtctcctacaaccctgagcctgggtgtcatttacagttgcttctttctcaactcactgcccgtggtcagttggaattttatgccttcatgacctctgagtgatggaggaagagacagtttttcatttagacagtgtcatgggaaaagtgttctctggggctctgtggcgcccgccatgttgattgtaacaggagggatgggggttctgtagtgatgggttgtctctcacagatctggacaagctagacaatgagaagaaggacctcatccagagtgacatcgccgctctccatcagttctactccaggcacctggagttccccgaccacagcagcctcgtggtgctcttcgcccaggtaagggtgccaagactcactaagacccccgcattcccttcccatgccccgcctacagtgtgaactcatgaagacacagggagcttgggatggtatctacctgacaaggtcctggaccctggggaggtgaaacaggtacatccctggggctcatcggcccagccagcatagctcacttgctgagttccaagccaatgagagggccttttctcaagaaacaaggtggactggggtggagagatggctcagaggttaagagcatttttttgctcttaccaaggatttgggttcagttcccagcacctacttggtggctcagaaccatctgtaactgtagttctgggagatcctatgacctcactgggcatgcattgtacatacatacaggcaaagtattcatacacattaaataaataaataaataaataaataaataaggaggacattgcctgagaaacaacacccaagattgtcctctggccttcatacctgtacacacacacacacacacacacacacacacacacacacacacacacacacacacactccatatgctaataatgaatggaaaaggtaaaaaggcactgagcattatttatagatgaagtgagtcttttcttacttcagccccagtgagaaacactgtcaagggttcagtgaattatatgtttctgtagctgtgtttcagtgtggttttcataatcagaaagttactccatgtgaaaggtaccatggcccggtttcaaatgttaaggtggaagccagtggtcttgctcgtttcacaccctgggtttgcaccctccccagcatctgggccacttttctcgaggggtggtaagacatgcaacacgcgcagcttaggaagtttgggctcatggtttgagggtgcagtccatggtgggcaggcaggaggctggcgcaggagagaggtcccagctgctgtacacacacttctcattggcctgtcaccccagcccgtgtcctgctgccatccaggttaagatgaggtattaccacctcagacatgcccagagggttgtctctggagcaagactaaatcctgacaggctgacagtcaatcatcacagcacctgaagatgtcgggtgagggtgtggacagagattttggaaaactgtatatacaggaggtttttctcactgagatgtgtttgtatgagaaagcagaacagccaggtgacgtctgtcacaggcggtggcaaagacctttcctttaacagagtggtgcctgctggcaggccttccgtgcgctgatgaaaccatgtgttcatatcaaaggtcaagtgtatgtgtggggaaatgaattagatatgcgtgtgcctgagggaaaacacacacacacacacacacacacacacacacacacacacacgtatgtgcgtacctatatataggtaggtaatctatcccttataacccttgtactgattaaatcttagtgtccattccaatactattcatatgccccctgcatgcttcatttctgttttctgttaatatgacctcgtacagcccaggctagtctcagactcagtgtgtagccaggaacgacaccaaccttccgattcccctacctccacttcccaagtgcaggaattacaggcatgcaccaccacacccaggtaccctgggcaagcactccaccaacggagccacatccaaaccccacacaccaccacatagtccatgtgtgagttttagggggattttagtacccctgaagaaaatgctaaagcacaaaagctgccttggcctccagctgtgcacgcgcgcgtgcgcctgtgtgtgtgtgtgtgtgtgtgtgtgtgtgtgtgtgtgatgttctacccctgggccgttcatccagcccaggaggctcttgcagggtaactcgaagcagcagcagctggcagctcaaggtgactgcactcctcctcggagctgttttaatccctgcaaacctgtgcatggctgagatttgtatttttggtgtgcagcctacatctagtttaaatgctaattatgagaatagctttagcaaggcacttacgcctgatttgactcagcgggggaaaaagagccatagcccatgcatctttcttagtgtgcaagttcacttttcttctctagggacatctcagaagggaggggaggttggcaggaaaattgctatgcagtttggcttgaacgccatcactgcgtgtccagaaggaagagtgatgacactcgttccataggagaacattcgtgcacactcccacagtataaggggaagggtggaaggagtgagaagacaggcgtcagaggctcatccatccagggcgaccacagtggaggggggctgcagctcagagggccaggagcccagtccccagggcctggggagctgactgtccctccatctgttttgatagctctctgctttctcgtgatattgttactgattgtctgggaatttcacatcatgaatcccaggggtctcccaatcactcttccctttagcgggcatttgtccgacattgtgggtaccacgaggcctgagttcagctggagagagctgttgtctggtaccagctgatgtcctaaccagtaacacctaggaatggagttcatgctccaagagattttgttgaatgaaagaaaatcccaattcatcctacctaatgtgcgttggcagccgctagttaaagcgccagtgatatacttggtcaggatggaggaaaggatagcattcagtctgctacttaagaaagtcgagatctttgcaattggtttatgaacctgtagtactcaccccttcctaatccttttcccctcctcttctcttctctccctttccctccctcccctgctctcccctcccctcccccatcttcgatccctctcccctccccctgctctctccccttcccaccccttcttttttttcttcctcttccttcttgcccccagtactgccccttaactgtggtaagcccaagacccctgggctttcccaggaaccctttaattttatgtagtcctgcctcattcacagttaacagacacagcttatcatgagaaatggcagagctggcgcaatggctgagccaggcaagtgtgaggacccaagctcagatcccaagacccccataaagccagatgcagtcataagcaacagtgcccccagcagtggtcctcaggcaatatgagaagtggagaaggagagcctccagagtcgtgcacaacagcaagcatggttacactgcagcaaacaagacaccctgtgtgaaataaggtggagtgtgagctctgacaccaaaggttgcccttcagcctccacacacaaccatcccaccccagttctcccacagaaaggaaaagtttttaaaggaaagcaagagtagtctgctgtacaggcgatggcctttgtcagagtatcctgtctgaattacggctcctgttactcaaactcacgtgtcacccatggggacccaggagctctggtttccatatttgtaaggtgggctgctacactcctgctagcaagatactgagggtttatgaggtggtggatctgggatgcccagcgtggtctgggtggaagaggggctaagcaatgctctttgaagaaaccttcagcggtgcggccgggtctccaggagcaggaggaagtgggcttctgagaggtagcaggactaaatcagtttgcacacatttcaaagtctcaggagtcccagccacctcagcccttgtcactggctggctttgtgactgtgactctggttcccatctctcatcttctaggaagagaagacactaagtcttccagccctgagcttttcagtacttagagagaacacgtgtgggattttctcccaactggctgaaagtcgccctgattatccttctgggggaagtgccctgcacattgtgctttttactatatatggaaagagaaatttgcagaattggcatccatagccatcactttcagccttttgaccttgaattagacctccagtgtggtaaagttgccatttaggagggagggagggagggagggagggagggagggagggagggagggagagagagagagagagagacagagagagagagagagaatgcatgcaagtgtgtgcaacgtgtgtacatgaggaagccagaggccaaccttgtatgttctttctccaaagctgtcctttgtgttttgagatgaacccatcactgggatctggggctcactagttaggccaggcagacagccaaggagctccagggatctgtctgtctctgcctccctggggctggaattacaagtgtacactgcatgcccaacatttttttccatggcttctggggatcaaacccaggtcctcatgtttgcaaggctatgactgagccatctccctggcccagctctaaccatagagtccttggtattctaaatgcaatcattcttctcaaagatgagaaagggcccagagattgatttagctggaatgagaaagaccaagtctcattgacttagggttcttggttcctctactgctccgaggaaggaccataatcccatcgatgagtaaaagcttcacctcctcatcttctgagatagacattgggttacttggttccttttctaagggaagatgatttggggatgggctccagatcacacacgcacacactcattggcgctcatgacccgaggtagtctgattcacaagcatacgaacaaagcttcaatcccagaagcccatcacgtgttcccagtgtccccacaccactctgccactctgagggtagccacatggagaggagcttttgacagcagcatgtctgcttctgtttgttgacacttggagctgatgagtagattatatttggacaaaagacgtcgtgctgcaagaagagcttcagcaccaccaaagccagagcatcttatataatttggcaagagctaaagctgaaggaatgatggagagctgggtggtgggggagctggaactggaggtctctctctctctcccctccccgtttctctacaggtgaactgcaatggcttcaccattgaagacgaagagctctctcatttggggtcggcgatattccctgagtaggttgagtctgacttcgttcctttccctttgtacttacttaacactaatttgattttcttacataacccacctgactgcgtgtggcagacaggaaactccaactgaattaagacagcttttaatctgccagatttcaaaatatttcccctacacttgaggatctggaggtggcagttagcagagcggtggcggtgacatcccgccaggcccagagctgttgctaaggagtgtcagtgcacaggggaacagcctgcggcccgcagggaagcgcactctcttcgggtccttagatctggaaatcttgtttcttaggctcaaagtgaaacattaattgacgatgcaagaattagccatggtttgggtagagaatatgtgagctcttgccctgctgccctttttggaaaatgccaacggaaagtgtcacagtttggagggatgctaagcaaagagagtgaacgagagaaaaatttcaagtgttaccgggtatttttttcctcatgacttcaggaatatttggatgatccctgaaagtctagctaatgtggagctctttttggctctgatgttaatggaaactccagaaggatccgtatgtcacaggcggagccaggggagcccctgtgcaccctgagttggttcacactgtgctgaggatgccacacaccagctcctggtgtgcctatctgctgccagctcaggcatcaagagaatcagaagaaagagacctgatcaagccgaccctagtccctgcagctttcaccagagagagggtctggcgttggccccgaggccaaggtgtggttggttagctgcaagagcaggcatggtgaggaccagagtgcctctcgacagagactctcttaggcaagaacagagaaaagagacatagggctctgtgcagacaacctggataaccatggtacttaactgaactcggcacagtggcctctgtttatgaatgtctgagggtgtctgaattgggggtctcactgtctccagaagtggcaatcccagatcccaagttacttggctgtctgtcctaatgccctccccaccactttcaacagcttgttcagagagagatagcctaacacttttccaagatggttctagaagcctcctctgctttgcttctaatgtgacctttggaagcgttgcttaacagacgtcctggggcctgatgccctgtgcatcccttgtcaggaatctgaggaggctgtagtacagggtgaggtgttcctccctggggaacaagaccaagaacaggctgcctactcatcccaggtgtaaagccagtcacccactctacccacacctctagcaggcagaaaagaggggagggtcactggggcagtatacctgcagtggtcctgagacccctttcctttttttatatcctgggacaagaaagtgacgggctgtggtctctcgggggtcaggcagtgctggccctgtgagtggtatatacagggacaggtgtgcccgcccacaagagcctaagccccagtttcggcatttttaattggggaaaaaatcctttggggctgaaatcacatgagtatgtgatttcaaaggcggcatttctgagatcaagcactttcccctgtagtttagaagtttctgttctcagaactctgaccttgatataatcagaaagctcaaagcacctcgactgggcgagcctctcccgtcactgtccctaaaaaagcagacagtgagcagcgggagcggccatgtcccaatttcccagatttggaggttgaggtgcttctctgggtccttggggggtcacagccctccctgccaagcaactggcatttctcaacatccaaagggaacatttgagaaacgatccacttagacaaaaaaaaaaagccccttttgtctcgcacccgtgtgtacgtggggggcagtcagctgctggccttgttgtttgagtctgttcagcaggagtacttaggctagtgggtgttcctcacttagagcttagagatcacctttcatatgacatttcatatttgagtatgttgaaagacactggggtgagggtgtggctcacttggtagggtgcttgcctggcaggcaggaagccctgggtttgggctccagcactgcatcagctgggcctggtgggacaagaggaggattaagccatcaaggttgcccatggctacatagtgaatcctagatcagcctgggctgcgtgagaccctgtcttaaaaaacaaaagaaaataagcagcaacccccccgcacacacacacacacaagagggtaggtattgttctaagtatgcagagaacatcctcttggaatagtgtaagctgtctgtatccatacttttcaccatcttacaaagattcaaactggtaggcagcgagtcacctccgacgtctgcccatggccttcagacaactgcgtttcctcttttgattgacagtgttgcattgatgaatcacagctgttgccctaacgtcatcgtgacctacaaagggaccctggcggaagtcagagctgtacaggagatccaccctggagatgaggtgagagggtagccatggtggccgggcatgggatttaggctgttgtgacaggcagagcagccttatccacatggcaggacctgactcctgcagctaaacctattggtcccatggccttccctgggttatctatcagatttgggacctgacttgatgtcctttgctgagtacacgggctcttgccattttcttaggccagacagaaacaagaaataaattcgagttaaactctttttttcccccaaattcatttattttactttgtgtatctgaatgctttacatgtatgtatgtatgtatgtatgtatgcatgtatgtatgtgtaccatgcacaagcctgttgaagctcctagatctggggttacagcaccatgtggatgctgaggattggacctgagtcctcgggaagagccagtactcttagtggctgagccatctctccagatcccttcagttaagttcttagccaagatttacagcctgtgtgtccctgctgccagacagttgactggtgagttcttacagttcccagatactccacagaactcttaacatcgttgtctgcatttgttgcttttcttgtgacaaaatgctcttaacaaaagcagctaaatgaagggatgttctcattttgtgggtacagccctgttcagctgacagtgttagccatcacgttattgagcagatagcccagcaacagccgatggggcaccattccaagtggcattcgaggtttgcttcttagaaggggtggccacgtgcacacccagatcagggaagtagaggcacttccaggacaggaggctccatcattgtcttcctcctgtaatgtagggtgtagagagagtcacgtgtttcaccacctgtttcctgaactgtttctctttctgatgccgtggtcacctgtcaccttgtgtgattacattgtctaggtttagttttggttgaactggtacttctgttttgagggacatgtcaccatcagtgctgagtggcaagagccttgatgtctctgaaaggtctccagcagttcacagctgacattcgagccccttttctctatgctaagtcccccatgaggtgggggggggtatcctatctgcagccaggatattgagctttctgagtggctggtggagatgagccttaggcctcttttaaagcaaaacagaataaaatgcccaaccctggcttccatggactggagaggcaaatggcctgtcttcctggatagactgttagagccttgaaaggtgccactggggtggcctttgtcgccatcttctggacgtatgtgtctgttgcactgcctacgggtcacgtcaaggagtcagtcaggtctggcccttgccacacctgtgttgcaggaactggctgttgtctttctttctttgttggcatgcaatcatggattgttcatgtggcaacttcagtttggggaagtcttccggggttatttgccctcagacagaaaggagtcaattcttccaggttccaggtattagatagaaccaagattagatgccccaggcttgccccttgagtcagggaggcaccggtgaggcgctgactaccacagcctctagtcctgtgctgttgtctctgactgcctggcagaggctgtgggcactgccacactgatgacagtgtctgggtgtgtgggatgcaaccattgctgtccctatgaatagatgagggaactacccaagcagaccacgtgtggctgaggatagctatgaaagtcccccaacacaaattcgtaaacatattcaaatactatcgaatctttgtgattttttttaaacttgtatgattctcagtcatgaggtcaaaaggtggtgcacacccaagagggctgaccttccctgtaacgtccgttctgtaacaggtgaggccaggagagtgaaggagccctcccgtgttccctggccatcatcaggtcacagctgctgctgagtgaggccacagtcacttgtatcttggaagccatgtttggtaccccgcccccgttgctacttagagttccccccacccccaccccccacagctcttgctctattgcatgatatcagtaggaaaggtgaacagacctgggtgtgtaaggccttactctcccctgcacatgcccagcagagacagcagtgaaggcccagagccatccacgtcaggatgtaaagagaattaaataagggccaggcagagactgcggggcctagtgctgagtcctgaggcccttgctgctgtccctgagcccagggcaggtcctcggcccgctgtttggtgaagcaaagtgaaggatccttctgtctcttagttcccagcttaggggctgagcctatagactttctcaccaccacaaggatgtggacacagttccacaacctctaaagagatccagagttaaagtaagcatgtggccatcagtgacagccctgctctctgtctctcccataatcccacgtcagaggtttgcaaagccacaggagtggtaagaactgcaatccctatcgcaaacctctggcctctcacaccctaggtgttcaccagctacatcgacctgctatatccaacagaagacaggaatgaccggttaagagactcctatttctttacctgtgagtgccgggagtgcaccaccaaggacaaggtcagttcactgatggggcagaagagaagggtgcttgttagtgcaaggcccctgctgtgagcccactctggcctctccccacacactcagtgttttgacccttttaacccgtgtgacagagacaggcagagggggtgcagctgggctgggctctgctcaggtctgctcctcagctggagaaacacccccagtccactgtgcaggtgggagaaggctctaccagagctctgttccttagaaagaagtggcagcctgggctgtgacgatggccctcagcagagtgctgcctcagcaaacacaagcacctgaattcacttcccaccagtgcatgtaaaaaagacagatgagaggaagtaaactcacaatcccagcactggggcagagggatggttaggtcactagagccctgcttgacgagagactctgcctcaaaaagcaaattgggggctgatgctgttacctcggggtaaacttgaggacctaagttcaaatccctggtacattaactatgtgtgccagtaaccccagggtgtgtatgtgtaggtagcatggaggtaagattattggagcttgctgcttgcagcctagcttcaggtgcagtgaaagaccctgtctgaagggagtaaggtagagagtgagagagcagggcacatgaagtcctcctctgcaccccatgtgcccaggcatgccaccccctcccaccatgttcagcaaaagcaaaaataaggtgggtggtttctgaggaatggcatctaaagttcatctctgaccttcacatggccggacacacatggtcaggctcaggctttttcaatgtgtcgccaggacctacacagcccacattttcagggccagccctggtcacggtctctcctgacttagaggcaaacacagacctctggcccacagaaaacacatttgggatcctgcctctggaggactggccccaaaactcacagttatggttttgtaaaaagggaacagtgtggggtttcttttagatctagaacccgagcctcagcctcagggaatgaaggtatgatttgagcagtttgccctggaggggacacctcacactgtggacatcccctcaggacaaggccaaggtggagatccggaagctcagcagcccaccacaggcagaagccgtccgagacatggtcagatacgcacgcaacgtcattgaggaattccgaagggccaagcactacaaatataacctttctgtgtgtcccttctctcgctggcaggaggtggtggggagctggggagggaggaggaggagagggaggaagaaagtctcctgtgggaaggcagatggcctcacagcaatgccagctctgacagcaccttaggttagaggtgctacatgggggaaagctaccccctggagggccatgtgtgttaatgttttagtacaggtaggcacagtgctataagccttgctcagccccggccacagggacactgactagtggacattgatggacaacagggaccctgttggtggtggcagagctaggattttgctcaccagaatccatgttctcactgtactgcagtgtgttcttgggactggaaaggagatgggatttgcatcctacctagcagaatttaaaacctttccttccctccccccaccacctctctctctgcctccctcccttcctttctttcttaccccagggttagggattgaacgtaaggccttgcgcatcctctgagctctgtctccagccctcttcctgccttcttgccttctttccttttttcccttccttccttccttccttccttccttccttccttccttccttccttccttccttccttcccccagtattagggattgaacctacggccttgcatatgctctgtctccggcccttttccttcctttcttctttctttctttctttctttctttctttctttctttctttctttctttctttctttctttttgagaaccatgcaggaggatggtgggctgggcaatagttgaagtattgcccaaagtctctttttgacgtcttttcatggtgtggtctagactaacaatgaatgccttccacagcccaggcaagctttgaacctgccctcatgaacagccggggtggtggcctgcatctaccaggcccgtgaggcacagtgttttctaacattagaaacctttcagactctctctttccctggggcagacgggacttttcctgtctccctcttctcttctgccctctctctgtctgtgtctctttacctcttctttctttccttccttcccccttccctcccctaataaaacttcttacttaaaaaaaaaaaaagaaaaaaagaaagaaacctctcgagaggcaagcttgggaatcctttccgtggggcaaggctttctaaactgtgcaggctcccaggctgggtgagcttgaattccacagaagacagcgggctccatcctatcctcactgcgggcctgctagctgaagctagcgtttgcttaccaaataggccttggggttctccatttctgcaaggaaattgtaattgcctttaattctgtttgcccctctgtaatttactcttcccagaggcagggagtggggcacagggggaagaaataaccctgcctgcccagcctaggatgccccgccccaccctcggtaccgttatttccttgaccttcagcaccccccagcgagctgctggagatctgtgaacttagccaggagaagatgagctccgtgtttgaggacagcaatgtgtacatgttacacatgatgtaccaggccatgggcgtgtgcctgtacatgcaggactgggaaggagccctgaaatacgggcagaagatcatcaagccttacaggtgggttcgagtggagccgcgcggctcggcatgagcatggcggccgctcgggatgagcatggcggccgtggtgcaggagtcttgcccagaacaggtactgtttcttggtacccacgtctggatgtgggtccgaggcgctgccccgctaagccagcctcctccaccctcccaagttgctccctcgggaagcaggatggcacggatcacccacaaaagttccttcaggctggagttagaaaggcaggtagcttacatctgtgcacacctgcctcttctatggagtggaggtgggggcggggtgtctcacaaccctccctccgcacccctgcacgccgtctgtccccttctgccttttcaccctgcggtgccagtggcatctcgaagacctctagggtcagtgggctgtgtgtgattactggggtcgcctcctcagagccaaataaaacaagctgggattccaacctgtagagacaatgacttagagaagaaagggcccaccttatagaggttaccagacgtgaatgtgggaagccatggcattgtctcctgcctctgatcacccactccagggctgagcccccccccccccccaaccaggcctgtacattaggacttcctttggagcagtgtaagcatgaaaccggaagtcctcttccccagagtattccgggtaatcctggtgagctccagaagcccaggctctctaagactagaaacttgtgcccctaatctctgccatccactaacccattgtgcccaggatcgccagcagggggagccagcgaggaagccagctattcacacctcctggaatgagctaaataggagacctctgacctcttggagggatgaggaagttctctggtctcaaaccttactctgagagagggacacaggcagacagcatcccagctgagtagccattggcccctccccagcttcgggggtgggagtgctgcagactcagggcttctcgaggcagcttgccgcctcctgcctgggaattcagttcagcatggacagagtagagcagactgcctgtgataagcacatcttccacacctgctcagacacgccctcacagctgtaccctgcgctctgctcccagggagatggccctttcttaagcatacttcaccgagcagacccgagtttagacccgagacatggtcttctgctagagcagagagaggaagagggcagaggtgttctggcttttgagggcttagggtatggcagacagttgggtttctcagatactatgtggttatgcacatgtgtgtgcatgcctctgtgtgtgtgtgtgtgtgtgtgtgtgtgtgtgtatgtgtgcatgtgtgtgcatgcatgtgtgtgtgtgcatgcatgtgtgtgcgcatgcatgtgtgtgtgtgtgcatgcctgtgtgtatgtgtgcatgtcttggtatgtgtgagtgtgtgcatgtgtgtatgtgtgtgcaatgcatgtgagtgtgtgtgtgtgtgtgtgtgtgcaggcctgtgtgtgagtgtatgtgtgcatgcctgtgtgtgtgtgcatgcatgtgtgtatgtgtgcatgcatgtgtgtgagtatgtatgtgagtgtgtgtgcatgcctgtgtgtgtgtgtgcatgtcttggtatgtgtgagtgtgtgcatgtgtgtgtgtgtgcaatgcatgtgagtgtgtgtgtgtgtgtgtgtgtgtgtgcatgcctgtgtgtgtgtgtgtgtgtgtgtgtggcctgtctgtctgatggagggaagaggcctggttgctgctgtccacgtgaaagcagtatttgctttgacatttctccagtgccttggtctgagtgcggctgaagtagaagtctgggtgtgtttatgccctcccatggttctgatgtggtttcacctgaaaacccactgcagagcacttatggtgtctctgggggtgcatactgcccgtccccacactcggcctaggacctggtgcactctggggaagccaggctgtatggtgacctgttgttcttctttccagtaagcactaccctgtgtactccctcaatgtagcctccatgtggctgaagctgggaagactgtacatgggcctggagaacaaggccgctggacagaaggccctgaagaaggtatgtggagctccagctgggggaggccggtggccgcaggaattgagagagtgaccagctctagggtaccctctggccatggcattctggggtgctttccgcagatggtggtgggatgtgatgctaagcctgcacttggtctaaccaggcccatcaggcaggagtgcgcacagcagtggggctgagctaggagagctgcggagagagttctccacttgtctgtttccagtgcctgggcttgcatctggagagtcactcagggttagggtgttgccctggctgtgagcttaactgtgatctccattcacgcaagccagtcacacaagggcttccctgtgagcagtgaggtagagtttcctgctggggagggtcgagggggcacggtggtccttcaggtaggacccttgaagctgggagctttaaccttgccagccacgctgggactaacacacttgtgcagaaggcacaggggcccaagcatgtgccatctgtgtgtgtgtgtgtgtgtgtgtgtgtgtgtgtgtgtgcgcgcgtgtgtgtgtgtgtgtgtgcgcgcttgtgtgtgtacgtgcgtgcgggcgtgcacgtgtgcatacatgcatgtacaggtgtacttataaatacgaggccagaggacagccttaagtgtacttcctcagtccacatggttggcagagtagtcactgactaggataggctgctctgccgttgagttccaaggaccctcccatcaccacctccatgctcagctttcttccgagggcctgggcctaggagtcgggtctatgcctaggacagcacagttaccttctgagctgtcaccccagccctgctgtccgtatggagagcccctcatgggagccacatcaccttcctgagagatagaatctctgttttccatggatgttgacagcacaaggtgacttccaggttggtctgttgactctctttgagaggttttgtacaaatactgcagccacagactagcctggtctcccacatttccccaaacacctgtggagtgtgtgggaaaatggggtcacacaccacatcccagatcagagtcagggtctggctaagaggaagtgtgaagagtttctgttgattttctgttggtgtcacgtctttgtctcagtgacccccagggaagaaagtgacctagttaagtccccgttggaaagcatcagtgagtctaaaatttctagaatggtaggttagaagcatggtatgagatgaggcctctaggtctcctcctgggtatttgcagggtggggaggaggccgtgaggtggaaggggtgggagtaaggctgagaggaggaggaggggatgagggggaggaggggaggaggaggaggaggaggaggaggtgaggagaggaggaagaggaggaggtgaggaggaggaggaggaggatgaggaggaggaggaggatgaggaggaggaggaggaaggaggaggaggaggatgaggaggaggaggaggtgaggaggaagaggaggaggtgaggaggaggaggaggggatgaggaggaggaggaggggatgaggaggaggaggaggaagaggaggaggggatgaggaggtgaggaggaggaggagaggatgaggaggaggaggaggaggggatgaggaggtgaggaggagaggggatgaggaggatgaggagaggggatgaggtgaggctgtgggggcggcttgcgcgctgtgtcttgagctctgacatgcagcatggccctgctgaattgggctcggtgggctaaatggggctgggctcatgggccccatgccttgctgtctcctaggccattgccatcatggaagtagctcatggtaaggaccatccatacatctccgagatcaagcaggaaatcgagagccactgactgctccttcagagacctcacagggcttgagtatttccagccccacgggccaccccagcctctgcaaagccttgcccgtgccgtccgcgttttcaggttcatgctcagctctgaccctgaagtcatctccagtgctttcctttctttctaagggtcatggtatgacttcatgtaatatagatttggggcagatcgagctttaaaaatgcgattatttttcctccatgcctgttgggatgttctgcatagagttgaatgaggaaagaataaaagagccagtccttgaagtgtttgttttctagcatgtgtgaggacatgctctgtgtacatgcatgtgtgtgtgtctgtgtgcgcgggcgcgcgtgctcgcgctcaacatgcatgtgttggaggggtgggctccttctccatcagttcttgagcccagttctctgcctgagagaagggttagtcatcttctttggtctacagttactcttacagaacagtcactctagaggaagaagggaaggtgctaggagcagtcagctggcctgagtgtgtgtgtgtgtgtgtgtgtgtgagagagagagagagagtgtgtcttgagtgtgtgtgtgtgtcctgtgtgtgtatgtgtgtgtttgtgtcctgagtgtgtgtgtgtcctgagtgtgtgtgagtgtgtcctgagtgtgtgtgtgtcctgagtgtgtgtgagtgtgtcctgagtgtgtgtgtgtttgtgtgtgtcctctgtgtgtgtgtcctctgtgtgtgtcgtcgtgtgtgtgtgtgtgtgtgtgtgtgtgtagtgtgtgtgtgtgtgtcctctgtgtgtgtatcctgggtgtgtgtgtgtgtcctgagtgtctgtgtgtgtcctctgtgtgtgtgtcctctgtgtgtgtgtcctgggtgtgtgtgtgtgtgtcctgagtgtgtgtgtgtagtgtgtgtgtgtgtgtcctctgtgtgtgtgtcctctgtgtgtgtgtcctctgtgtgtgtgtcctgggtgtgtgtgtgtgtccgagtgtgtgtgtgtcctgtgtgtgtgtgtgtgtcctgggtgtgtgtgtgtgtgtcctgagtgtgtgtgtgttctgagtgtgtgagtgtgtcctgggtgtgtgtgtcctgggtgtgtgtgtgtatgtgtgtgtgtgtcctcggtgtgtgtttgtgtgtgtttgtgtgtgtgtcctcggtgtgtgtgtttgtgtgtgtcctgtgtgtatgtgtgtgtgtgtttgtgtgtatgagtgtgccctgagtgtgtgtgagtgtgtcctgagtgtatgtgtgtatgtgtgtatatgtgtgtgtgagtgtgtcctgagtgtgtgtgagtgtgtcctgagtgtatgtgtgtgtgtgtttgtgtgtgtcctttgtgtgtgtgtgtcctctgtgtgtgtcctctgtgtgtgtgtgtgatgtttgtgtgtgtgtgtgtagtgtgtgtgtgtgtgtcctctgtgtgtgtgtcctgtatgtgtgtactgggtgtgtgtgtgtgtgtgtctgtgtgtgtcctgagtgtgtgtgagtgtgtcctgagtgtgtgtgtgtcctgtgtgtggtgtgtgtgtgtcctgggtgtgtatgtgtatgtgtgtgtgtgtgtgtgtgtgtgtgtcctgagtgtgagtgtgtcctgagtgtgtgtgtgtttgtgtgtgtgtcctgggtgtgtgtgtgtgtcctcggtgtgtgtttgtgtgtgtcctcggtgtgtgtgtttgtgtgtgtgtgtttgtgtgtcctgtgtgtgtgtcctgtgtgtgtgtttgtgtgtgtgagtgtgccctgagtgtgtgtgagtgtgtcctgagtgtatgtgtgtatgtgtgtatgtgtgtgtgagtgtgtcctgagtgtgtgtgagtgtgtcctgagtgtgtgtgtgtttgtgtgtgtcctctgtgtgtgtgtcctctgtgtgtgtcctctgtgtgtgtgtcctctgtgtgtgtgtgtgtgtgtgatgtttgtgtgtgtgtgtgtgtagtgtgtgtgtgtcctctgtgtgtgtgtcctgtgtatgtgtgtcctgggtgtgtgtgtgtgtgtgtgtgtcctgagtgtgtgtgtgtcctgagtgtgtgtgtgtcctgggtgtgtgggtgtgtatgtgtgtgggtgtgtgtgtgtgtgtgtcctgagtgtgtgtgtgtcctgagtgtgtgtgtgtctgtgtgtgtgtcctctgtgtgtgtgtgtgtgtggtgtttgtgtgtgtgtgtcctctgtgtgtgtgtgtgtttgtgtgtgtgagtgtgtcctgagtgtgtgtgtgtcctgagtgtgtgtgtgtgtgtgtcctgagtgtgtgtgtgtcctgagtgtgtgtgtggtgtgtgtgtgtatgtgtatgagtgtgtcctgagtgtgtgtgtgtcctgagtgtgtgtgttgtgtgtgtgtgtcctgggtgtgtgtgtgtgtgtgtcctcggtgtgtgtgtgtgtgtgtgtgtgtgtcctgtgtgtgtcctctgtgtgtgtgtgtcctctgtgtgtgtgtgtgtggtgtttgtgtgtgtgtgtgtgtcctctgtgtgtgtgtgtcctctgtgtgtgtgtgtgtgtgtgtgtggtgtgtgtgtgtcctctgtgtgtgtgtcctctgtgtgtgtgtgtgtgtgtgtgtggtgtgtgtcctctgtgtgtgtgtgtcctctgtgtgtgtgtgtgtgtgtatcctgagtgtgtgagtgtgtcctgtgtgtgtgtgtggtgtgtgtgtgtcctctgtgtgtgtgtggtgtgtgtgtgtcctctgtgtgtgtgtgtgtgtgtgtgtgtgtgtcccgcaggaggacgtggcttcttgcaggtttctcttgggcaccctctggagctatttagtgatgcttcctcttcctgccatttcccatcccgttcatggacttttccctgtgcgttactctcctggtttggaaaggctccagggtaagcttgagaaggaaaaactaactccctaccaaccgtgtgctgtgagcaaacactgtctcactctccaacaggaccgcggcagcctgggcctatgctgaggagcccactgtgcctctgagggcagggatgattccctagcaaagtgtctgcaccccagagagggatttccctactagatgacggaggtaccttctggttgtctatcagtcaccatcggcttgaatgactgactgtagcaccagtgtgttcccctctccctcacctacatatggacaactctcagtcaccacacacagtgggacttagctggtagtatacattctgtcaggtgtagtcattcagtgaccatctcctgtatgcagaacactgcctaccggtccagcgcatggagaaggctgaggcagtcctattcttagtctccaggcacagggttttaagtgtatatgctacggctgagcctcacatgagcttgggctaccatctttatgtttggaaggtttcaatttctcattcaattaggaaagtgtgccccaacctgcaggagatgccactggtcggatctgtcaccttccccagatacagaggcaaacccaagttgcttttctggcttaacagtggacacctgtttctgcacttagcagtcattctcatggctttcaaccttaggatgtaagagtgcacatatcctgattccctcaggaggcttacaatcatgggtatatggttttacctggttcttttcttaactttttttttttcttgacagtatttctctatgtatctctggctgtcctggaactctgtgtataccaagctggccttccttgaacttacacagatctgcctgcctctgcctctgcctctgcctccccagtgctgggcttaaaagtgtgcagaccacacctggtccacattaagcatcctaagcataactgatgtgtggtagtactggggggtagattcctggaaagtgtaatctccgggtgaattaggacattattttacatgtttcttttacagaataatagtatttgctttcctctccctttaagactgtaaaatcaacagtaaaatctgttagtctaatgtatgagatattctgtgcatttgttcccgggtggttcttttgcgttctgtagaagctgtgtctgtgagtaggtatcaatggctggggtattttctgttcgccttcctgacactgacgctggagtgggtgtgtaacttttctcacaccagctggtctttctgcccagcggacagctcagcactttcaccatctggtcagtgtcaaacggtgtgcatgtgaggaccctgtactccaggcctgccctcacttcattgctggtcaccaggatgccactccacttctgtctggcgtggctacccagttgtgcttggtaacgggccacagtggttccccaggccaggtcactgtttgacacagttaactgctccttaccaaggacacagaacacagcagaagatgtggtctgaggagcgctgagcaggttgcctgccacactgcccacaatgctcacagcaaccctcgggatctgaccatttgcgtattccattacacaggcaactgccagtcaacctcccacaccaaaggctgaagtgtggagctggctgttacaagctcctaaatggactgtggtcttcagagaaaaaagagcttccaccctgggtttaatacgtaggggtctaccaagagttgtcttgtcagtgctgggaaggaatgagccctgggacccatgtgaaaacgaggtgggtgtggcaacccccctggaaccccagcaagcagagataggggatcctggaggaggcttgttagccagagtagctgaaacaatacactaggggttcagcaagcaattgaggctctaagtggagagtatatcaacctcaggcctgcacgaacaccacacatgggaacacacacacatatgtaaataataataatattaaaaagattgtctcattagtacaaagtagaggtagggagggtctcagttataatagagtgtgtgcctggaacaaaagaaacttctagcactctccctcctcaaacctgtcacttttattcaggaaatcccaagtgttttagagctgtgtgctaggaacgagacaccaagactacacatcttcctaggatcctgcactgaccttagcctggttttgtctgcatcttcgtaacttagaaccccgaggcatagtgggatgtccatcttccttgctgaaaatgcttccacctctgttctttagcctatgtctgccatctacccgcgattgtttgatgtatttagtttctgtcgctgtgattaaaaacccggacaaaaagtgacttaggggaagggtttattttggctttgagtatggaggggggaggggaggactcagcaggagtcagggaatacatggtggtgggagtaggaggctggctggtcacagagcagagagaacctaacccagacactaaacttcctccagcaatcctgacctcctgaaaagtctgtagcctcacaaacagtgccaccaactaaggaccaggaatgcaagacgatgagggacatgcgcctatggggggtattctatatctaaacatgagcatctgataaggtttccaattttacattttaatcaaatgcttaaaagattcattattgcatgagggtatgaggccagaaaaggatgcagagcccctggagctggggcagttgtcagctgcctgatgtgggtgctgggacccaaaatctgcaaggacagagaacacccttgaaccttctcttgaaagttggaatctttagactagtgatcctttcctctctcccacccaaggagctgctggggggcttctcaggctctacgtcacagccagtcacacacaggatggctgtcctcagagtgcccctgttcacagatatgacatggtcaacaatttgtccaggtttttgccttaaagggggtttgtttgtttatacagcccaacacactcctcagttaggttttatattttctacagcaaaggaaagtaacatgtgaaaatcacaaaacaaaactctgttgagattcctgcttttgattactctaatgcatacttgtgtgtgtgcatttttttaacaaaggaaagctctttttttttttaaaaaaaagattttacttattatgtatacaacattctgctttcatgtatatctgcacaccagaagagggcaccagatctcattacagatggttgtgagccactatgtggttgctgggaattgaactcaggacctctggaagagcagtcggtgctcttaacctctgagccatctctccagcccgtgtgtactttttttattttttttatttttatttatttatttatttattttgtacgtatttctttggtttgagggattctttttcagttatttttttcctcaagccagacagggctcagtggtgtaagtggtgaagtgtaagcgagccgcccctgttaaatgttttccttcataagggttgccatggtcatggtgtctccttgtggcaatagagccctaagaaggagccctagccctgctggaagttgtcatcgttgctccgactcaccaagggcacacagcctcctccaccctcttcacaggtgggaggaggttgcttacagactgtgactgagggacctggaaggggagcagctttaaacctaggatgagctgagcttttacaaagccgaaggacaaaactaagaatgtgggttttcttcagtgccctccacatcaacgtagtgtctgagtggaggacgtggaggaaggaaggacttcatgcttcctgagggctctctctgcgtgtctgagagggacccatttctcagctgttttcactactttcctactactcgctccttgtgtgtttcttctaaagtgaagacatcggagactgcaaacaaaaaggaacacagaaggcagtttcctagaaggctttgcctacaaaactgcttttgggggattggagagatggctcagaggttaagagcactgactgcttttccagaggtcctgagttcaatggtggctcacatccatccattatgagatctggtgccctctgctggtgtgcagatatacatagaagcagaatgttatatacataataaataaataaaatactttaaaaaactgctttcgtgtgtgtgtgtgtgtggtttttcaagacagggtttctttgtgtagtcttggctgtcctagaacttgctctgtagaccaggctggccttgaactcagagatccacctgcctctgcctctggattaaaagcatgcaccaccaccagcacccagacccaaactgatcttgaagtaggagacagtagggaaagagttagccatgtgagcacagggacctaggttcagtccccagaacccaagcaacacagcagggcttggtggcacatatgtgtaatcccagtggcagagacaaggtacccctgggcttgctcaaatcagaagtcccagtccagtgagagaccctgttcaaaaacatgaggtaataaatgcttctgaggaatgacacccaagcctggcctttggtctccctaggcacgaatacacatgtgaccacacacacatacatacatgctcccacacatgcacatatgtacaaagtaagggaagccagtatattcaagtagtgccgacgtgttacgaaaagactcgtgtttcctctgaaaacaatcaaaacaaggtttattgcatgtagaaatcaatagatatcttttacaaaaaaacaaggttagaataaagatctcgcatttgtaaaggcacataggaaacattttatagcaatgacaaagacagagacaacatcctctaggatcaatatctaaataagacttcataaaaacaggcaacagtgcaaaaaaatactgtcaaaagtcagctccctacaactcaggactgtgtaagcagctggcaagcaggagcttataaactgatataaacagctcgtggaacagtgtgcatagctctacttaaggcttcttactattgtcacagtggcaagggtggctgcctggacagtcaccgtgactatcgggaactcaggaaggaatgtcctcgtgtcttctctgtcattccctgccctcagctgccgtttgttagcaaagaggcctgactaccgtctccgctgaggagcaagtggctgttagggtcacttagtcccaacctggaatgcattttttccagcttacaacacagtaggtgctagctcgtgcccaggccagccctcgaaagccaaccacatctgcagcactgcactccagccacagtggaaggagctaggcttccatgggccgacccaagagccctgaagcaagctgtttcctcagctggtgggcggtgtgtgtgtgtgtgtgtagacatcatttaaaaataaaatctattgatgtcaattattttgaaggaaaccaaaattcacaacatttgacagaacacagaccaaaagaaagcgtcaaaatactgaatgagggagcgacactagtctagtgagagaaactagtctgttatatatgtaactcgttacaaaaggttacacttttaatagtcatctgcatatgtaaacctcccccaacccagggtacccttagccaggtcagctgaccactgagggatgaaggacatacatgggaaatcatgtctgatgaagagtgagcttccatctgaatagatgtggttaaagaattttagggctcccaatagtcgcaaggaactgcaaaggaaactgcaataaaattttacagtgtttgagtctaaacaaaatggctccgaagggcacttttcagttcagggctgaaggtatttattagctaacactgtcgctgagggaggcagggggccccagagaaatgccaagaacgccgggcgcctgagccacctggctaaacttgaagcagcattcctgaggcctgagcaagaggtcccatctgaaggcaaggaaaaacccagtctctcctccgtatctcccacccgagtcggttcctggagggagaggttggggaagaacaattaaggcagagaggttggacagatagcttatcacggactgccaatcacacacacagtgttgttcctgggaagccctgaggtgcacctgtcccaggcgacagtaagcagggaggctgagaagcaacatccagcagaccagaaacaggttagactgcaggttaccaagcagcgctgtcacccaaaagcctgtggagggcacctcaaaacaaacagggagccctgctgccacccttatttttaatagttctgagatcagtcttttttcctctcccctggcactgagggacagcgtcactaaggatggagcctggcctggttgtcagaagtcttctgccaccttcacttgggccactcacttcccagatcacatttcttgaggccatggaaagttcctatgtcaacattttagagaagttttaagaccactatccctttgccagatttaactttgtgtgtgtggggggtgctccatgggcaggtaggttaaaatacagagtgagtttcagagagctggtctgggaagccagtagtgttctgagtggacagagtgccctggggatggagacagtgacctcacaaaggagtgccacctggtccccacactcacactggctgcctagccgtatttgtgctctgaatacacgtgacgggcacagtgattcacaagcaagaggaattgtgaatgctcaccatggaagcagtgccaacaggcagaattcggctcgaacactacaagggaaggagggactgactgcagtgtcagccaaggagtctccagtggggccctcagggcacagagaccacaggtcacacagcctaatacaggcagcaggcaaggagcccgggagaagcagatgtctgcagtgcagcatggtcttccctgaggtgcctcatcatagtttccaactctgatgccacggcaggggtcaaaacattgtatacccaaggaatttggggtaggacactcagggctgatgaaggctctccccaccatgtctttggacaagctcagggcacttttaatagaggatgctcctgctggtcactctttatgttaaccatagttaggctggcatttgatctagccccactgcctgacaactaaatgccctctaatttatctctaaaatgaatggacctttaaacaccaagaactgatgtctaaacagtaatatattatccatctatgagattgaaggatgccagatccctaatgcctggtcatgggcaggctgacggagaacatggcagccagagtttgagaaacacatgcagtgcattaggctgcaaaggctaggaatggcgtctataagatgaagacacccactgcccctgaggttataatggaaatgcaaaagctcagagcaaggaaagaaggctgaatacaggacaagctggtagactagtgtcccagctcggatgggggatgtccttccgcatgctgtgaatatatgtttctcttattggttgacgagtaaagctgtttcggccaatggacaggcaggatgtagccaggtaggaagtatagatggggcaaccagagtaggagaattccgggaagaggaacagagagaatgagtcaccagagggacgccatgtagctgccaagaaagcaagaggcttgggtatcacctgtaagccaagaccatgtagagatacgcagattaatggaaatgggttaatagctaagagagctagccaataagaagcctgagccattggccaagcagtttataattaataacagcctctgtgtgttcatttgggactaaacggctgtgggactaggcaggacagaaacttgagtctacacagttcccctagaataactgacatctggacaagccatttggattggcagcgtgtggccaaggacagctgcctctttccccagacatgtggatactactttctacagatgtatcaggagaggtggcttgctacccaaagacttaagacgctgaggtgaaggccagcaccattctacctctgctcagagagtagcgctacagggctaactgtgacttacttcactctccagagccagtgagtctgtcgctcatcaagttgtaggccaccagggaatgtgcagttccagtggaaagacccaaatctctctattagaagctgagtgagctggagtgccactcgtgaagaaaagacgccacatgagagtctgatggcagcctgactagaccatggcaaagaacagcagcagcagaatctctggtaaaatggggacactgggagcccaatggcagtgacttggcactctgtgaacaaagtcgttccgaacactgaggaaaaaaccgataaattattaccaatgggggctagggctgatcatgtcccttgagtttatccaacaatgttttggtgttcttgccctccccacctcaagtaattggcacatcttccccaaacaaatcaataaccaaatttgctctctctaatagtcttgccactagaaatgggacagactggaagacagagggtgcttgttgcctaaggacatgtgtgggacccatggatgatgttggacctgaggtcagaagatacagatcagtagcctagtgcttcaagaaagcagtccaagaccccacaacagcatgtctgtcggcccagcctatcagctcgcagaggcagttcccagccctaggagatgcaagaccaccacagctgggtagcggcatcacgaagaaccagctctgtgtcacaagctcttagttgaagaaaagacacctgctattagatccttaataaactgggaagaaatgaatggtacgcattccatcaattcagaaagtgcccttcatttctggaaactcaacactggtcaatctacagtaaaatggaaaagacaggaaaatgctgctaacttcctctctgcccacaggaggtaggaactgaaagcaaaggccgagagaggaccagggaaatgtttgcttaggagctggtggttgcgtgccacaaacatcctaaagtctgcaaagacactctgtccaggccagtggaggtggctgagagagcctaagactcaggaataataataataataataataaaaaagacagcttacttccaactgaagaatggtgagcaggccctttctcattacagtaaaagtctcccaaagtgaacacatgaaatcacagcttaggagatatactccatgtgagatgccctcaccatccctagtagctgcagcacctccggagtagaggaacccacttttcttcgtctcaataaagcaaccgacaagcctgtctaccactgtgctcacatctacctcctggggagggggcatgttcagatgtgcagctcctgggggttcatcctccacctggaatcacctcagagctcccgccagaccagccagaccctcctgggcttcaccacaagcccacctcaccctctcaagaatgaatcagccaggatgcagagagccctgaacaaggacaaaggtggccatatgtaactgagcgtgagccaaagacaaaactccataactggagaacctcaaagccaggggctgggaaatgatccacgctctgttgtgagatgggatgtcttattggctcctgttttaattttctccccctccaaatccaaactgcagcaatgggctctgacagctccagcttcagtcccaacacattgtcaggaaagcgttccaaagccctggctggataactaatttaatacacgttgcttcaaggcttactccttggctggcttcccaggtaggaagcatctctgggcgattattatgcagatgccactgaaaaggcttcaaatgcctgctgataatttacccatggatctatgagggcttcccggggatgggaaaaggaatctggaatgtgttgaagcaccagaagcaacaacactgaaatgttttcttttgggtttcatcatgtgttggctaggaagccgggtatcaaacctacatcttccctgtaccttgttctgttagcataggacaaaaacagcccctgagtgatgagttcaaaagggcatcctatctcctcgctgctctcgcgagacattctaacacagcaaggctgagagaccacgggcgagtaccgtcattcttcatcccataatgaaaccgtgataacagtgggaccgactgttaggaccctggaagggaaacatcttcaaaggaaggttaaatccccccaccccccacacgcacacacacaatgggctctcccgtttcccccaaagtatctatgtcagaatccaagccagtgtgccaggtctgcaaggctcgcactcaagtatgccccttgattcattctgcaccgtgggaggcagggtggatgtgtccccctccagattctgaacccccagacactgtatgaacatcagcatcagcaccgccctggcccagggggaagacagcttggctcattctccagagaagctcttggggcttctgctgtcaaaagcatctactagtgtgtggggaccaccaaggcacactctttctggttggtctcttcagctcaagataaaaaaaaagaaagagagagagagaactataactgtggaggaagacatgacatgctcagttccacaaagtcacaattatactcggggaaaagtagacgtgggaaggaaactggacttgagagtgagggtagttaataccatccttggccagagagtgggctgtgcaaggaaaggtagacagtagaggactttgcaaaagacactctcagcattcatcatggggggcacgtgtagccggtgtgtggtggtacacacctgaagtcccaacagttgggaaacacagacgggaccctgcctcaagacagcaacaaaaaagccctaagtggaatccactcagtccttgttagtcagtgagtcgggcatgggtgtgtgcctcccagcagggccctgctacaatgccagacagctcccagatgtgaacttccttcaccatttcccttacgaccatcctaacaacttagcaatcgagaggaaagcggaatgtacctaaactgcatcctaagtccccacactcaacattatttagttaagaatccacaccaaggccctacccaataccatttccaccctggtctatcatcttctatcaatcgggcacggggctgggctgtgcagatggcctggcccagggccaccaggtgagggtgctgggagcacgcaagacagagtagcacatccccagcttgtagtcccattagacttctagaccagaacaaggggtgagcaacagagccagcggcatccctcctctaccagagacggcaccgccagccttaaaggcacgatgctttcagcagagcccacctttcatcccaggctcagagagagagagagagagagagagagagagagagagagagagagagagagctgaggacgagggcagtaaaggagagggaagcagctatccatcgaggcacacggatccagtgtgtaagggaatacctgcaaggaccttcccttggctctctttcttacggtgagcatgaattctttctcttgccacttttgactgggggtatgaccaattagtctgcaacttcactagagatgtgttcccttatgcctctgtgcctataatgtcccctggggtcaccaccttccctcccggaggcttacatgcagatcagtcaacatgtggttcaaacgagaagcactatattattgtgaaaaaaaaatgcattataacaactcacaaaacttattccaaaggcggaaaaataaattatctcatataaaataatacatggtgtttgtaagcaactctggctcttgcctgctgccagccatccgcctccaacctgggtaggcagatgttgtctggaagtggcgccccctgcaggatggagctgggtccctcctcccgaagctgcatccgggaaatcaaatgagcctggagttctgcaggaactggacgaggacttggtagacgaacttgtactgcgcgatggtctggatcatgaacatcctctgctcccggaggaacctcagcatcgtgggcacttccaccttctgcaacggaaaagagggggcgcatggcctgagaccgggcgcctctcctgggctcctcccaccccggaagcctctgcctcctgcgcatgaccaggaggcgggcagagctacgggaggcagcggttccaagccggggctgggagcctgcctggtcacggtgtggtgtcattccttgtgtgtttgtttaggctgactcctgagggtgacccgagtgctcgcactaaaacttcgaggcgctcagagcagtgagctgcggcaaatgccgaacaccatccccaccatcacctccaccagtaccattgggacacaattgcctcctgccacatgcaggggctgggcagacactgtcacggattctccaaggcccgcagagaagtccacagagcggcactggcgctgcccagcagcctgggagagttgtaaccccatctctacctgacagctaccaatctcactgcagggacccccccacccccaaccccacccatgttcaactagtctgtgttaagagtgagaggacagggctagagagacggctcgagaggtaagagcgcttgccgcactcttcccacccacaacgttcccagcacctatagcagggctcacagaccccgacggtcagacacttttcttctggctttgtgggcaccgcactgacacgcacccctccctcatcatctacacataactgaaagaaattattgttttttttttttttaatcaggcaaaaggaggaagaggatgggaaaaagaaaagcgcttctttggcaaaatgaaaaccgctagaattccaagctaaaatttaaaaaatacactgatagcttcagcggttagaaaaggaggttaagttgcgatgggagaaaatcaggtcatagcaacttaatgttcatttgtcaaaagtctttgttcagagggcaaactaaatgtgtctgcccttctccctgatacgggcacaggagtgggggagccaggcttcaagaacacagggcacagcagacagtttccttggtcaacagcaacgctggggaatgggacacacaagactgggtaccccgtgctgaggagactgggtacccccgtgctgaggaaaagaaatgaacagcatgagtcatcttgctgcccctcaatgtccatggaaagagaagtccttttagcactggcacacaccagcaaggaatgttcccgtatgcagctggacagtggcgaacgttcactatgttcggacacaccatgaggaagccccagggagcccagggggtgccctgttggctggatcccctttccacaccctcacaggctggctgagatgcatgtagcatggtgagcaatgtgatttccagtcactccttcacagagggcatagattggtctccaaagaaccaagagacccgcctttcacagccaagaagaagccaggccggtatttaagctattttgaaatctcccagtctactgtacacgtattaccacgctgctgtgtccattacacacaacaagagttcctcgctgtgtaatttggaaactgaacagaccaaccgcttgttggaaacagcgagaacacaggaagtgacctcagagaaggagagcttgcttcctgccatcacacggctgcttaaaggctcgaggcaccaggtacatcatatgaccgctcctgggcctgcatttcctcatctgtgcctggctgtgcatgaaccagaggtgagggtgcactttattaactagggctggggacctagtgtaatggttacatgacaagacccaactaaaaagcacaaacacctgcaacaggctagagatgatctcagtggtagagcgcttgcctaatgtgcaaagtcctggattagatcccccagaactcccacaaacaaagaaacacagactagcagaatccaaaacccctgctcccaaccctatgcacaaccttgttcgaatgaaggctgagctgttgtcgatgactctccgtacaactccagaatctcacggcagtgtgggataacacaccctgtgtgactatagcaaggagcagcccgtgctggtgcccacattcccacgctctgtgctacacaacacactgccaaaccagacgaggtcaaatacctccaaataaaacctggactgcaaagaataacaactgtgttctacacagacgtatcttcacacaaaaactgggacaaagcacatcccagaaaagcgagacacgtctgaactacatgcgccaggacaatgtgccgtgggaaacgacccccgccaccagaaccgatctggctacttccgggaatgaaggcagacagcagtcaggtctgctggctgtttctagaacaccccatagagtaggagaggtcagagacaaggaaagccataaacactggagttccgctagagaaccacgggtctggaaacttaggtcagcagagaacaatcagtgacaaagcaggtgagaggtggctctagtgccgaactccacaaggtggagaaggccagaggcctgggaccatgctcagctgataaactgcttaccacgcaagtgtgaggaccaaagtcaaattcccccagaccatgtaagcaataacaaccgtgaatgatactacgccctcggttccagcactgcagaggcggaggcaggaggattcctgggagctcactgaccagccagcctgcactacttggtgagctccaggctgatgaaagatcgtggctcaaaaaacaagctgatgttgcctgaggaatgaccactgaggtagaaccctagcctccacacatgctcgtgagcacgcacgcgcacacacacatacacacacccacacaagaacacacatgcacacacacacacacacacacacacatgaacacacacacgaacacatacacacagtgcacacacacacacacacacacacacacacgcacacacgtacacctatacacacacatacacacacacatgcacacgcgcacacacacctgcacacgcgcgcacacacgcacacacgcacacacaggtccctcccatcaaataagtagatgccataaaaacactgagatagagaaggaggactcacttcattatgctctaggcagtagatcatgagctcagacagaatgacgacgccggtccttcccacccctgcactgcagtggaccacgatgggagggtgcctggtcttgatgccttccagcacactgttggtgtgacgcctgaccgactggatttcctccaagtaggctgcaagacagaatgtgaatcttgtcacccaagagtgtcacgtgactttggagccaggggaagaggggagaggcgccaggactgagggtgagtcctttgttttcagtcatgataatttgcaattcttataagacactaatcacttggctggtacctgttgtaacatcctggatccagaagacaccagctgggagtcaattagtccacgggagaatttgttctttaaatagttcttttttaaaaaaaaaattaaattctatttttccctctgcaaatccccaagtcccccaagcagatgattctagacattacttacagcatttcacactattagcagactgggagcagagcagccgctaagtccccttgaaatgcctgccagtcagagcctattcctgttggggaaagagcagccacctgccgcgtgggcatgccgttccccctcatccaacgagtggatgtcaaccaaggcttgatctcattgtcagatgtaaaacatgggctttggggaatccacttccgtgaagttatgtgaacattcaagatgagccccacttctggagacaacaagcctatgggtggagggttcgagatacgctctcgcccctctcagcagctgcccagtccagcgggagtgtgcaaaggtttgttcacagccccaagtgggctgagtgaagacttaaaaaacagccattaggcaacccacgtactttgaagggatgctctgtatccttcagtagcttaagccgacattcccaaaactggctgattttaaagatctgagtacactttagactgtctcatgggtcccacacatcggtaaagcggtcaatcatcgaaccaacctacttgcattgtttccagggttttcttcttgtggacaactttaaccagtccactagcagaagattccctgaactggataaatagagtgaagttgggaggaaggtaagttctgtggagatcactcccctcctgtgctatagacaactggtcatatgacctcaggcaaagccctaacctttctggggctttgcgtcctttgtaacatcatggtcctatgctctgtgttcattgtgttccttgaggtctgtccccattttaatggtgaatgccatcctctaacaatgcatcgaaatctaaaagaaccggagaagtggttttctaggtcttgacaacctagtctctctgttctgagccttctcagtccctaaggccaattctaaacatatcaaaacaaagcaagcttctgatgttgcccaacatgtacacagtggagtggacttctgtgcacactgggcctctgtggtggtcacagtttgcccaatagctgttggtttcctgacctgagccactgcctggcactcagggcacaaatatattctcagtgtctaaaataaaaatacacaaaatggatttgcctgacataggtgctccatgcagagggaaatcttatctctatgtctgccatctctgacttggtgtgctgtcagggttcatccatgttacagcacatgttagatggtaactgattacagacacactacaagtctaaatcaatgcagaattagttcaccaccgtcttgtggacttgcataaagggttaaggaacacaagcaatatctgttcctcttctctgccctatgctggggcggagagatcagtgcctcgctactacggtgctcccactgctgtggagaaggcatcacacagcccactcctctccatcggagagactactgatgcatttcgcaaaactcagtctgggaaacacttacacagaaatccttgcacgtcctctgggcagccatggtggggccagtcagtgtattgcaaatgccacacagtcctctcctggccggacagcaggtgcttgacctttaaccctgtggttgcatagcaaccagagtctgttcggaactttgtggtgaccttgaacttgccataggtggctgagctgtgcttggaccccagtttgggccagtatcgatggcttttggtccgtccaccctcctgaatcacacacaaaaaagcaaaagtggaaacaagtcaaggatgaactcttctcttcctgatgtcagggtctgagaataggagagcaggaagcagtttctaaatcgtacctccacggggctctgtgcagtgcttacagggagcttggattttagcccacagagggcagaaagccactgctggcttcaggctggtaagcaggagttcctggtggtcagtccacaccctgcttctcatgcccatgctaacccaaggctctttctcaggcaccacacactgcctgacgctaaccctacattccagggctgctctcactttttgttctgccctgctggcttgtttcggtcaaacctgcagctaaggcagagaacagccacttatgtgcccttgtttgtttcccagattttatcatcttttcagagaccatgcacaacctgcaaactcttattctcagtggtgtgtagttcagaaatcactggtgtggggtgggaagcatggaggggctggtggctgatgaggagatagagagcagaggcaggatgacaggaagaaaacacgaggagcagtgagctgttaatggctagaggaaccccttagggtgaagatgtcccatgaagtctgaggttcactctgtaggactgcatcaaccaggcataaaccaactatcacttgagaggtggaaacattgtctcaggcagataactaaataaccaactaaataaaggaaccatcaacctgccggtttgtaagtgacacatccttgggggatgccaatcatcctgtctggtcccagaaggttaactgggtcttcctagctctgaagtactttttttttttttttaaattccaattctgtgaacatgggttgactggaaaactcagtcatatttgttcactgcccaagtcatttctggattttacaaaatgatacattcctggctatgccaggtgtcactaggctctgctttgttgtgacatggcagatctgcctgtcactaatgcctcagccagggcaccagaaagtcacagctgccctcttcccctgaccatgagttagtcctcacagccttcagacttgttctgtctgctcccttttcagtgtctctcctaggaggtacacactatggggaccaggagggtgcctgtctcagtcaccacccaccctatagtctacacagatggatggatggagttagatggatgaattcaaggctagcctgggctatgagaccatgtcaaagagacaaaataagtaagtaaataaaggctaacagaataacagaacccaccacgacctgatctaccaggaccccgaatttagtttaaaggtgtcatgagttttgacagttgacttcatgtgggtgtgtgcatgtgtgcctgtggaggtcaaaggtcaacactgagtgtccagccaaggatcttcctgtcttcacctccccatgctgagactccaagtggagggctgtgaatccaaactcgtgtctctatgcttccgtggcaggtactttaccagcggtaagccacctctccagtgccagaatttacttccttagtggaaggccagagagggagtgagcaatggaagttgtctgaccttcgagaacttgatgtaccctcaccaaatctcttcatcaactgctctggaaagtaactgcccagcacagtcattggtggtgatggtgggggccatgactttgcttttgagtaccagttttccctgttcccggcctaggataacaggtggggatggaaactctcactaccaaggggtcttggtaaaatgcatgaagctagttccctaaatgaatttgaaaatataacgtggagtctcataagaggattaaagggggtgggggcacaatgttctgggagtgtgacagacaggaaacccaacactcttccctcagggtcagtgtgctctgagcaggcggcatcacacgggggcggggcgtgccagtttgggcagcgcaggcacagttcctcagctacaacagagaacctgtgtttgccttggcaaagaaagaagaggaattttcttttcctgttccctgaaaaaataaagccctttcctacagcagtggctctggtcttgtttcagctgataaacaccatggcacacagggctggcagcactggggttgggaggccctgtgtgtttacccagcacagcctgagctgttctgtggggtacatgccgcccgctggatgaacctgagtttggtcgttttgattctgtgtttggtttccattgtagtgaaatatgtcacaaaggaaagagttaagagccaaaggaaaaggaaagggcaaaaaagagtcccctgtaaaccatccctggggaaggaagtgcacacagactgtgaggaggcacgctaaccccgagaatgaatgcacagacaaacaaagctgtagcacgcagcagatggagcgaaagtcatgggtaccaggcctgccttctggtcaccccttccccagaacaagggtgttaagtaagccactcccttacctcctctgcggtgaccatggcgatcacgttcaccccctgctcccacaccatctgccagaagtcatggcaggtatgtggcaagggtccctgagtggcgatgtagtgccattctgccccaccaaccaccacctgtaagccaaggagagcatccgtcagtgaagccaggctggtggaaccatgctggactctaattcttttggaccaagtcgatcggtgcaatcataaaaactcagaagccgtaaagaatagatgacacacttgtgcatcaaaatactttttgctaaagcaagcctaccatgtcatatttaccctttaattgcatgcgactcactatacacgaaaactagtacagacaaaaaacacacgtgtgagccgaggaggtgggaaaactgccttctgcacaagcgtgaggacctgagttccatccccagcgcccacgtgtaagtcaggtgtgctgtggtgtatctgctgtcccaaggctggagaggttaaagaggaaggctccctcgggctcactggccaaacttgctgacacagtgaatccaggctcagtcaaagacctgcctcaaaaaaaccaaggtggaaaggctgggtgaggtggtcagtggtgaaggtgcccaacgttaactccaatgacctaagtttgatctccccaggatccatgtcatggaaggaaagaaccaactcctgccagttgtcctctgacctatacacacacacacacacacacacacacacacacacacacacacacaccagatacaggcacatacacatagactcagtcacacacacataacacgggcactcaaaataaaatgtaataataaagttaagagtgatacagaagataaatgatgtttacccttggccttcatttgtgcatacatgggggagtgcacacacacacacacacacacacacacacacacacacacacatatatacaccacatataaaaatatatacatgtattcacataaatgtataagtacacaagaatgtatgcacacacctaagcataaattaacagaatgtatgttacaggaacaacacctatgcttagtgtgtgtacaatatattcttataattttcatgttttagtctgtttcttattaaagtatatgcattattgcaagcattaaattagttttacaaccaccaaaggttgtggttctaaacaacttgaagaatagggttccgtggcagacttttaataaaagcatactctaccacacaaaaaaacatgccattggcaaaaacagacctagagaacagatgtggaatggtgacctcttccttacctgtgccttgaggtgacaaagatgagcccctttacacatctatgcaatgcagacctccagagggctctggaagtgatggggtttttttcagacttgcctcctcatttattttgtgagactaattttctgacaaaaataacatcagctatcgtctcactacacaagacatgctcaggtcaaggttggcaagaaaacccattttccacatactggtggtagaaaacacccacaggctcactgggaaggggcgggggggggggtctgtggaactgggaggctaaacagcatccttcctggcacccaatgtacaggaaccataaataccagcagagaatgctgcctcctccaagcactgacaggaggcactgcagagggagagtcaaagacacagcgccacctctggaggaactcaatctccttccgggtcaatggctgcttggaacccaagagagaaaactgtggcaaaacacacagctcaattccagaagccgagggcaagttcctgcaagttctctgggccggtgaaatgctcccaggtctaccctggatccgcaagacaaaatgtgggccgtggagaataccgcagaagggaaggcatctcgggtaacaatgcccaaagggcactgtttatgtggagtgacagctgtgtccaaagagcagaaagaaaatggggaagagactgggtcgggaagaggccaggaggatgtccctccatatggtcttcagaggcgcttcacccggaagcagctgcgtcgtcctcatcttcagtgggttactgtgctcattatttcatcatctaactaagaatgtcattggtttacttgagagttccctatcgctcatcattttattggttttgttcttgttctcaaaaatagcaaaaaaaaaaaaaaaaaaaaaaaaaaaaaaaagagagagagaaagaaaaagaaaaaagaaaagaaagaaaagaacagaagaaaggttgcatgttaaacatgcatacacaccgggctatgtcccgtgcataaagacactatacccagccatgccacatttttcatgtcccatatggaaactagctacgagtgatacacaaaccagatgcccaactacatcttcggggtgggggtggggttcaaaggaaccttctagcaatttccaccagagttgaaaagtccaaggaaattaagagttcaaagctgctaatcacatagattactcaggtgaactgtgttgcataaaaatatgtcctatatccactgactgagcaagagcttttgaaacactctccaggtcagaggtcagagccatgttctaaagaagaatgtccagtaattagaaaaactggcgagaatgagctgcttaggaaatcattcaccctaggtacccatgtgtttgcagctctgaattctaactggggtctagctagaccatggcacactgagacaggaagtatttgagacattaacagaaattccacacactgtgggctgaagagatggctgagaggttaagaacactggctgctcttgcagagaacctgagttcagttcccagcacccaaatgaaggttcacaacctcctgtaacaccagttccaaagggcctgatgctctcttcctacctctacagccaccaggcatgcacatacacacatgcagacaaacatacccataaaataaaaacaaataaatctaaagggaaaaagagccttgctctcccattcattggccgggcaggatctgctgcgatccatcgtggtttgtgtataaatcactccactcttaacaacagcaccaaaagttatggtttggctctaaagcaaattgcctatggagttataaagaagaaacaatagtttgtgctgttattggacaggataaaaacactaatgatagtaagagctatgagttccaatgtccgtcacctgtgagtcacaaaccaacaggacagtcgcacttgccatggcttgtgggggattagtgagtgtctgcaataatgaatgcagccttgtgagtacccaggtgtgtgcctctgacaccccctcaccttgatgtgggaggcattgatgtagcctgtgttgttctctttggtggggataagctccaccctgttttcctcgtaagggaccacctctcggatccggctgcgctcggcgttttctggcagagtggcggtgctgaagacgccattggccttcttgtttgggatctgctcatactctgtgaacaccattccctcttccagcttcttcttcagagctctgagctgcaagagaaggggggcatcagctctcccaattcccacagagcaatcaggctctcagcattgccagttagggcgtttctgagatgcagaatcggcgggtccttagctactgcgctcactattacccacaccactaggcttgtctctctgctctgacgactgtttcccttctcactcagctataaacgcaatctgcaaagactggcttaagtggaaagtcaaactccgtgctcctattacttccgcctgtctgcaacttttgcttgctgatcaggacagtgccaatcttaactatcccaagcatcctttgccctcacagcagtttttactgaattactaaagttcacagttgtagagagctgaatacaaactcacacaacacaacttgccttattccttccccggacaaaccactaatttcaattacatcgtattaattggggggaaatgtcccttctgacccaaggaaacattctaataccagcgtttgctgacagaaatctagcatgctaacgtgtcattcagcgaacctaggaaaccagtttccagaccttctggtagcaagtccggcagctttagccctctcactttccatctcagcaacagaatcaatacctaaccaaagaactatgggtcacaccaccttatagctctggaaggagactgcaggaaccctaaaaccctggatgactgtttcataggaaacagcagtcattacaaaaatcactgagtgtgtcagttgaaaaattttttcaactttctcatcttacaaaaagagttctccacacttagagaagcatattggtctcactgcagaaaaagaaactttagtgtttccctcaccctccctctgcatgtttcaaattagtgcatcttcgggttcaattgtgtgaagaaaacaaatatgtcaatcatatcagaatgcaaatttgcttttttccttagtgttaaaatcatgtaaaacgcataaagaattgataattatattccccacttagggttaaaaggtaaagaactaagtgagtaactaggccaaggttacacagcttgttggaggttagtcttttgttttgattgcttattttgtctggaagagcaagctgtgtggaggtcagagtacaccttgagagagtcagttctcctttggcacaatgtgagttccagggattgaactcaggtcttcagacttggcagcaagctcccacacccattgaggcatctcgccagccctggggctggactttctaatagagcgtcaatacacttgcttgctatgtgtggagaccacaatgaagaaacagatgttggaaagggttttcacacagcacacttggaccaagtcttcttcagtttgaaagaatgaacccatgaggcaaacagcatcgacaggcctgggcaaaagggactcctggaatctggaggcacagggagcgagtcacacccgacaacccagcactcaccctgtcatctatgggaactcgggtggcatcctgtcgactgtcttcccgccctgggacgcgggccaccgagagcccattcagtgctgccagcatgaggggcctcctctgtgggtccaggccagccatcttctgcttctctagattcttccggcaagaaaagacacgttctcattgtttataattccaggggaaggctggaatgtgttttaatctccccaaatctgtaactccccagccaaggaatgcagacattcaccattagcagggcaaattcaaacagacttcccattattcccaccgtgcccagggaggccagttcttacaggaccctagggcctttattcttaattaactcatacgttaggaagataaagaaagactccttagcaaatataccttgtcacagggtttgcaagagaacaaaaaaagggggatttgtgcaaatacacttcagaaaactatgggctagagacaaaagaaaggaaacaggatgacagggaatgagtccatcatgaggacaagccattcgcactgattaatggcataaaatccatcagctacagtgctggttaatagatacacacagcagcagcaaatgaagaacaccaggtttccattctgaggggttcaggctgaagagcttactcccagtctctgagatacctgctttgccagccccagaacagggtctaacatacttaacaaagtcaccaccattccagtctggccacagaccatgaaccacgaggactccgcctttcacgctccatccagagtgaacggagggcagtaactactgtccatcattggagggtcttgacgagagtgtggactggccaaccctatctgcccctcatctctgggctgaaacaggtgtggtcaggcatggatgctgggatcactgttgagcatccttgtgtctttggcctcagcgggggtatgggcatcctccctctccactgctggcagcctactctcttgaaaatcattttgccttagacatccaggttagagtgtgaaagagaacattatgatgctagccgaagcaatgccagttgatagatgcctttgacggctacagatgcagggctagtctgctttcttcaaggattttatttcttattgtatcgtttatcaatttactcttggaggagttatcttgagggagccatgttgttgggaaagtagcactgaggaaggcaggggtggggtggcagggacatgggctttcatgggcttccttgtggccacagtgtgacctgtggtgggggagaaacctacactggtgacagacaggctgacctacagacaaccacgggtacatcagagagcaggggagagctgtgagatgtgatgggcaggtgaggagtgactgagccaccacaaggacagccggcgtctccacgccaagcagcccgctgggatgagtctgggttcctttgctactagctcaattttggggaagacaattctctcctatctcctctttccactgagttttgaaatgcttcaaaggttttgttttggtttgatttttgagatgaggaggtttctctaggtagctctgggtgttcctcaaacctgcaagcaatcctcctgcctctgccttcagagctcagggattgcttttcttgggaaaggctcgccacccacccagggagaagtggatacagtgactgctgaaccaggactcttaggtgcaagtgtcactcatcccattagcttttcagcagggacaataaatttaaaaaatagctaaataaataagcaaagctggctttctttgctctctgaacctgactccgggctctgggatggaaggttggaaaagtcatcaggtggcagcaggagtgaaggactggtaccctaagggcagcgggctgagccattcatcccacgaaaagcaactgagaacggggagctcacaccaaaccctcgacacaagcttgaggtttctctctgttctcttagttctaggggctggacggctgcagcagctttccttcctactctctgtaaacagaggacttgggagctatgtgggtgctgcctaggccagtgagtacaaacacagattaatgacaaagattcatcttgagtgctacagccactggcacaggtggccttcttgcttgacctcctagtgcttctctgaggctgaggctgtgtgagggagtctaacagggacaggaacgtagacatggacagtcatgctcctgagctaaaagctaactgtaaaatctgccaccaccctgaaacaaaacagaactggggaaggggacagcagaaaatacttcactcttccttgtttgcccaatgcttccaagcaggggaccagcaacagggctatggccaagatgaggttacaagaccatgtggacattgttaagtctccacttggcagggccaacctggaagctcaatgcttacggtgatggattcctgaagccaaggcagcttttaagaggccagaagccaagaagtgttgaaacatcacttcacaccaatgaattacttttttccaagctgggaaaactgtctcttcatggtactcacccccgcatttcactccattcccagccaacagtgtgtgtgtgtgtgtgtgtgtgtgtgtgtgtgtgtgtgcaagtgtgtctgtgtgtgagtatgtgtctgtctgtgtgtacatgtgtgtctctgtgtgtgtgtgtactgtgtaagtgtgtctgtgtgtgagagcgtgtgtaagtgtctgtgtgtgtgtgatgtgtctgtaagtgtgtgtgtgtctctttgagtgtgtacgtgtgtggtgtgtgtgcatgtgtatgtgagtgtgtgtggtgtgtctctgtgtgtctgtgagtacatgtgtatatagtgtgtgtgcctgtgtgtctgtgtgtgtgcatgtgtatgtgtgtgagtatgtgtctgtgtgtgtgttgtgagtgtgtgtatgtgtctgtgtgtgtctaagtgtgtgtgtacatgtgtgtgtctgtgtgtgtgtacatgtatgtgtggtatgtgtgtggtgtgtgtgcagtgtgtgtgtatgtgtgtattgtgtgagtatgtgtatgtgtctgtgtgtgtgaatgtgtttggtgtgtgtgagtgtgtgttcaccccaatgcaagaagcatgaagtccatccatgctgactcttgtcaccaccgtgctgaccagtagaacctgggggctgaactgccttcaggttgttctaaagttggattcgacctctgaaccctaaagtgtggttctgtaaaaactttttggccttagcttcctctgtctgggttgattcccaaggatgagttcggaagattcagtaatgagcctaatgacctccaacaaagcaaacgtaatgtgagcgtcttccagagttcctgagcgaaggatgtgatgagcaggaaagcagtcggctggctcaattagttacataattgaatgtcttcttaaggaggtcaggatttccagggaaatcggtaatgtaatgaggaagttttttttttttttttttttttttttttttttccccagcatcaactacaatccaacaatgttctcattgtaagaggtttattttcttgtttatacacatctgccaccatgtggtctcgtcccaacaacaggactagctctctaggctgtgtgcatcccagtgaaggcttacctgtaacactgacactgcagcatatcttcagatgtggtgtgtaagcatgtacaatgtatgtgcacacacgtgtgagggaatgtgacggggactggggctcagggggacgctccttagggacccacttacccgggctcagtggtacacatctcagaaagaagcccaatcactaagatgttcctgtactaagtacaccagccacaagccacgaatggaaaggggacgggaggtgttacttgatatctgctgacatcaatgctgaaatacccaccattctttaaagcccagcacgctccccaaagcccccctcctctaggcctccagtgccagggcccccgaccatcaatgacctgcgagtggggacactcaccctagtcatcatctctctctctataatgctgtcctccagggaaaacatctctgacacaggcctttccttcaccggttctttcttgacccgctccttcacgctggtgaggtcaggctcagagatggagggacccagagaggccccattgacagccagctgctcagcccgggagacactgagggccttggatggcccgtgtctcagcaccctggctctggccacggcaggaaggagggtcccctggtcctgccgcaatgccccgttactgacactttttctcggccctgggtactcaggcgggggcctgttgggaatgcgggccagggcagcctgcagctgggcactgtattccaccttctcccgaagcacaggaatctgaggcaccgcctcgggggcctcctcctcttcctcactgtcactgctgtggatgagcatggtagcatctgagagtgtcttcttgtggtgatactggggaagcccgtgaacttcgtggccacctgcctcctcggaagggccctgctcccgaagggtgttacgccgagccatggggatgttgagtgacttcagtgtcatggcctccatgcctcgcaccatactgttcatcacctccaggctgtggcgtttgttcaccgtgccgtggtgcttggtggctgtgaggggctcgctcacctcctgtaaagactggtggaccacgggagagctgtcctcctggaaggtcttcactgacagctggaccttccgagttaccagatcagggctgctgccgctgacatacttgtggcggtggctggcgaggtctggggtgctggtggcaggacggggccgagggtaagggggtggtggcctaaagagacagttcctgagcatgtgggctgtgctgtagttttgtgttccttgaagctgcatgttggccagttctggggtgctcactgtgtgcgagatggagctggcccctggctggctaggcactgtactattcttggggttcatctggtcagatggactaacgagtttgtggccgtagcccccctggggagcgtacgggacagtgtaggggtgtctgtcccgcatctccggctggctgtacaccagctcctcgggctgggtgtaggcatgggtattgataatattgaggttacgcagagaccggctctggctgtctgcgtgcagcagtcccctcttcatctgccgcatgactgtctcgtaatcaggggttggcctgtaagacggcacgatgatggtgctgtggcggtggctggggatgtagtcggccctcatgatgtcacttccagggatgctgaggttggaagacactggagaggcctggatgaagctttgggagcagctgagggagttaatgctgtgaacgctacacacgctgccattggtgactgtaccatttaagtaatttaagtccaggctgttgtgagaattgcaatacaaggcttcttcgttcccagggaaaatgctgtctgtaaaaagccaaacagaggaaagtgaaccatcacaccacacaacatccctatgtccctggagggaccactgagataggtcataagaggcaaattccctgaacctcacccacacgtcacaaagaactgttatcttggatgaagtgcccgtgtatagaacatgtcagagcacactgcaagaaagggtatagcgtaggcatcgcgtaggcgcaacctcaaacttgctataattagattcagacaatgagctctttgttgggtagaccgggcctcttgtgcacggcttaggagcagaaccggatatttggaccaggaagtcaagagctttaatagagcaatagatttgaaactgccccaccctcagagctactgtctcttaactacatcccaaaaaggctcttcgcctaagggactgctgagcattcagagggaagcaaggccaatggcacggccagcacggctgtggtttctgggcagtggtcagtggatggcaaagtcagaatcaggagtttttgaggagttcctgaaactgtcttctaggtccaccaccaacgttgattccagcaaaaagtaacaaaggctgaaagaacccaaagagctacaaaagctgtttttgcgtgtatttatggtatgcatgtatgtgggggcatgtgcatgcatttgaatagaggactaatgtttatgctgggaagcatccttgtcactcttctgttggattcgctcaggcaggggctgtcggttagactctgaacttgctgatatggcgtctcactagtcatctggctcaggggatctcaccgctgccttctgaggctggaatttcaggcgggtgtcaccctcatctagcatttatgtgagttctggtgaaccacactctggtcctcactcttgaacagcgagtgatttaactgctgtactggtgaactttatgtcaacttcatatacgggaaagaagctgcaatcaagatgatgcctccatatgactggcaagtctgtggggatgttttcctgatgcagggttggtgtgtgaggacccagcttactgtgggtgttgccacctgggcaggtggtctttggtggtataagagagcaggctcagcaagttagaaataagccagtaggcagtgctcctccgtggcctctgcatcgctcctgcctggagctcctgccctggttccctcagtgatggactgtgatctgagaattttaagttgaaataaacctttcttctccatcttgtctttggtcatgttttttatttttatcacagtatagaaaccccatgtaagacaacccctgagtcatctccccaaccatgaaccacaaaagccagtttcttaactctggatatgcagtctctctctctctctctctctctctctctctctctctctctctctctctctctctctctctccctccctctctctccctctctctctcgctctctctctccctctctctctctccctctccctccctccctccctctctctctctctctctctctctctctctctctctctctctctcacacagacaggatattcagggtctctctctctcccacacaagcactcatatacccatgcagcacacactcatagatgttttaaaacattcagctatctgaaaagaagtgtagacacagttaatcaagccacaagaccgagaaataaggacgacacagacaagatgcaagcatttatccacctccagtggggtttggttacatttgagtgagaacaatgtgacgctgtttataaaaagtactgttgcactaaatggtcttgtttcaggtttctcgttcagccttcccattgcagcaggttcagaacagcgaggagaggctaacagacatgggtgacgcatctgatacgtggcaggtgaggttttagatcatcattttaaagatgcagttagctcaatggtaaaaacacattagtggtttactgatagaagagatgaatcagtttggctggggtgatggctccgctggcaaatgaggacctgagtttggatcttcagcacacatacaaaaattccaggtgtggtcaccgatgtctgtaatcccatcattaggtgggtggttaaacgacagctgacaggaagagccattcactgtgcagccaatggggctaattggtgaggccgaggtttagtgacagaatttgcagaatctgtcttaaaaggtgaaaagtgattgaaagaaaaacacccaacatggatctctggcctacacacacacacacacacacacacagagagagagagagagagagagagagagagagaagagttcccatgtccaaattctaacattaacctctgccttcctatttctgtatggaaacaacagtaccacaggctttactgtgagattaaataagacaacaagaaacaagttcctcgcctagcaccagacaccttaccaccactgcatccatgttcattcttgtccctgtacacagagaaaaggcctgaagtggggataggaaaaaaacactgaacaacgagtgtgacagtctctcctatcaccccttcaccatgcggccactccaaactcctgacattggcactgagggtgaagccagtgccctcgggagggctgggctgtcaatctccacccctggcccactaacaacgggagaagaataagtagggaaaactcatcctctagctcggccaggccacacttcttcctagttacccacatctgggggatttttctttccaggcagctggtatgcttagtttcacaaactgattctgctggccactgtgaaatcaagctgtcattgacattttctagcaagcttctctctctgctgtgcccagggacccagcgtctgtcttacagggcagaaggacgggctacggatggttaccttgggaagtgtgggtctccgagtagtgctcgctgctctgcacatgcatggggggcaggatatatggctgctgccttggctgaaacagagaaaacacaaagacactcgggagaagccagaaaaccagtcccgaccccggcaagcacactgtagctgttccatagtgtggtccctctggcctaccctcttctactgacctaagctcccatctcatagggacactgactgagaacagcagaaattgggtcaagatcagagagagaaaaaaaacgccagcacccaaagtctgggtggaaccgttggctagggtgtcacacactggctacgttctctgggtctttgaaacaggtgttgtcaaaagagatgtacccttccaagaatcttgctttgctgtgtccaaaaccagctccccacacagcagcagagcccacggttccagcacacagaaccacgggaggctcgagtagggtcagggatatgttagtctgggaccagtggtgaatttacataggagttcaaagtatgacacacctagtctcaaggccactgcagaatcacatgtggcatgggccagataggcgctctcgtccagaaaggacaccctcctggccaatgccgaacctctgccactgactcgtggatgtggccgttagaccactctgaaccactcgtgctgcagaagagggcatacctaacgttagggtctgtctcctagccttatagcttaaaactgggcgttggtggtgtgcacctttaatcccagcacttgggaggcagaggcaggcggatctctgtgccttcaaggtgagcctggtccgtctagtgagttccaaggcaccaagtggggaacaaggtaggtcatgaaaacaagggatccaaaactcagcaggagtcagaggagaaaagtgcggatatgaactgagggaacttcaggtgccaaggagaaggtgctgctcacacttctaagcaaccccagaagtcctggcggatgcttttagcgttgcaatctcaaagcagtctttcttatgttgacaacatataagtcaactaaaattctctgtggtagataaggactgtcatctctatgaactaaaagaatatgaggaggtaaccacaggctgggtgcacactgggtgtagagaaaactctttggtgctcatgtctatggactccagggaactgtacacctcgcagagtaggaaggtcacccaccttaaagagctatgacaagtagaagacaggcagtcctagtaccccagagtaacccttaaaacacgagagcctgcagcagactcgcccacagccatgcttcctgcccacatcactgggaaaaagaacagcttttaaaaagtaaaaaattagccaacggctaggggctttattgaccaaaagtctggaaatcagaaaatgtcccatccatttcaatacactgagacagttaactaaactcatttggttgtggttcattaaaaaagcattttctggctagtttgctcagcgctatctgcggttgtgagttccttggaatccctggcactcacaagtgcgatacgttagcagaggagatgagcaaatagtctgaagctatatatatatgatcatcctggcctgaaataaccctggggagcccctcaaaccacacgtacagaagagggaggtgcccacggataagcaggacacaggggataggtgccacacctcctgcaagtgaatgacagccttctatactagtcatggtgcccttagtcacctcaaatccataacacaacccttaccccaacagccagaccactggctgaggacgtgtacgtaccagggaggaccggctccaggtgggctgtcgtctgattgggggtggagaatttgacggtctatatgaaaaattaaaaatgagggccatcattattgctgaccaaagttcaaaaggtcagacagacaagggacgctgagaatggggccaggctggaccagcgaagcccgccttgcagcacacacagtccgcacagttcacgcctgtacaccaacaccatggactcagctctgtcgaagttccctttcatcctcaaaattttccgaatgcatatttttttaattacaagaagactgaggctttactgctaaagaaatacgaggagagaactaaagactgggaaccctcacatgtcacgcgggcttttaaaacagcgtcccttgtgaacctgtgtgtatgtgcatagtgaaaacgttttgataacgcttccagtttaagtaaaattccaaaatagagaaaatatttttcagtttgagaccataaagatgataagactgcaaatgtttatcaagccaggtgcctttgctgtttgttttaactctgttctgatgctgggggtcaaagccaacaaacggtaggcaaatattccatagctgaggtatgtcccctacccagcaaatcttttacagacagagttgtctagcactgattaaacagcaatagcagagaggcgtgacaagccccaacagagaacgtcattcttgagtgtgggtatcaggtggtcccaacaccacacagtgtttaaaaagcaaaatgaaaaacaagatagagacttttcatggggataaaactcttcaaataaaggctctcctgatttggagattttgcccttctacctgcttgctgataaatatctttgctctggtgaaaccacagagataatgttgaaggactttagcagctggtcaaattcagtgttatcatccccaagttaaacacagtcttccaactcttcctgcccaggtcaaaggtgtagcaaccatgttctagagggaggtatcccgatggcaaggaccagttctgcagaggcggaggctgcatgacaaccctgggtgatgagtggacagatctggatggagaaggaatctactgggacacttcaagttttggagaactttaggggaatgcccttgccttgaatctagagctcgccacgtgtgtggcaaggatgaggttaagtgtttcccataccatgtcaggaagaagaaaggaagggttgtcccagaacagaattcttgattttcagtgttacacgtggtgttcacagatattagaacagaccacagaaaaaatatgaatgttgaacacagcattgaagccatttgctgagaaacggtaaaagaagaggacggcaactcccaaaggggctcatatccaccacgaagccagctgtagaagaccttgatggtgcggaggccaggacacaaatgcaaaggcaagagcaaactagaatgcatatgatgagtgtgtccacagaaggcaaggtcacgcccttgcttggcccttctaacccatccttactaacttggctggtaggcctagactatcagatgtacctttgaccctaccagcgagccacggcagtgcctagtttgaaagagcctgggctatggtggatggaaaaagtctgccttgacctggggctccaattctgagcagctgccttctccagcgacacctgccacgcagcagtatcccaccttgcttggatgtgtccactgtgggagtggaaagacagttcctctcttgcatttacatccctgatgctctttgaaccaaaattaaacaccttgggggcccaagcggcaaatgcactctgtagagggaacgccttttgaaagcaaccgacgtaaaggcaatgacagagcgggcccccggcacgccatctccgaggtcaggccacgaggaagtgccctcaatcagactcagacttatcatctttatttccgaactaaattaaaaagacacacagatccgtgccatctcagagtgccttccagatccccctctaattaccctggcctctcatttgcagtcagatggcacgacccaggagcgcacgcagggcctgccaactgtgagcggaaacaggccgagccagcggcagcatcctctcttttaagttggctcatcactctgctccccacttctgaatacactccacatctaacacggaggggcacctgggcaaattgggaacagctgggctcttccgaactcagcgccgagtgtgggaaaggcactgatgtggcccacccatccaggaagttaaacatttatagtcaatttgggaatgattgtctctctaggcacacggactgaagtagatggcactaaaacttctcttccctcctgactggctttagactcctcctatggctgctaagaagatcaagggaaaagaacgaatggaaacgggggccacaactcctcagaggcactcgatttaataggaccaagccatccagagagagagggtgaactataacattaacttactcagtgcagatcttgttctgtttgtaaaacttgtgccgtgttgtaaataaccgagaaatatacttggcattttcaatgtcatccttgaaaaagaagaggtggggaaaaaataagaatgagttggattcgatgtgtccttcacaaagactcctctgtggagacatcccatcccctccactcccatctgaagcacaagacaacatgctgggccaggaagcaaatcaacctttgtgatttcaatggagtccaagctaccaaggcccagcaaagatggcagaaatgaccatctgctaatgagtccttcacaccagaggtgctgggtctgaaatgacgaactaactctaattctaaaccagaactttcaaaaccaataactgaatcaaggcagtgcctacaattaacaccaatgtcattcaaccagagacagcatgatgaggtcaacagtcttcactcccgaaaagggacttgagtagagagaggggtgactaactgtagacagtgtaggttatgaggggattgaaaaatccaggtcagccagcaacacaaaatgcaaatgtgacgtaattagtagtcacctgaggaagactgtgaccagagtgccatgacatgctggacaaacttgaatgttagtgccaaagccagtgggaacattcaccacttgcaagaagtcatgcaggaccaggcaagtgttagaaagagtcccttcactagcaccgagttccctcacggagtacaatcatgggctgcatggactcttagacacctgggaaggcagccaacactgtaagcatatttataacattatgaagaggtaggtgtgtgtgtgtgtgtgtgtgtgtgtgtgtgtgactagactgtgtagtctctgagtatagactttgtagatgaggacaatgtaggggtgtgtgtgtgtgtgtgtgtgtgtgtgtgtgtgtgtgtgtgtggtgtgtgtgtgtggtgtgtgtgtgtgtgactagactgtgtagtccctgagtatagactttgtagatgaggacaatgtgtccaacattaaaaggctggacatacaagtattaggacatggagaatgaggtgagggcattgttagcttaaaaaaagaaaatccctcctcatgctgtgcagacccctggactcactgtgtggaagagcgccgtctcctccttgtcaatcagctccagcaggatagatgatttgctgtgggtgacactcccaatgtcattccacctgggtcaaagaaatgtgactactaggtttacttgaagatggcccaccagaacttacaactatgatttaactattttaaatatgtaactagcttaaatattccacctcccaaaggggaaaatggcaagaaatcaatatgcaccaactcacacagttaacaattcaatttaaaatatatctacttagtgacaatcatccatgaaatgcagttttctttacgggtagctatgagaaaaatctgcaaaggtcttgttactgttcccccaagtttcccactgatgaggcacctgccacgacccctgaacattttagtgacccggaagcatagctgaagttctgttgcagtgtgcacttcacattcactgtgccgtcttggaaaaattgcccaatggctgcttctatatctatgcatcagtcatgaaaatacacacataggtgtttttccttgcctgtcctcaggcctgtctataacagatgtgcaaggggctgactcagtgcatggatccaggcaggaagacacaggaaatctacccgagtgtgggggcctgtggtccccagggtcttatgagaactctaatcccagaagaagatgccagacaacaagaaataagtggttgcctcccattctacatggagccagttcccagccatctttttaatgggcaagctccagcagccatctttttaatgggcaagctccagcagatgccccagctacagctcctcacctatccctttggtagtcggtcatgctcactgaagttcccatctctgtttttgtcttttctctccctcccccccacaaggtttcaagtattccaggctgatctcaaacttaaccatgcagctgagagtgactttgaactctgaccctcctgtttctaacactacacacaatgtttatgtggtgctggggactgaatgcaaggcttgctgcatgctaggcaaatactgcacaacccgggctccatccccagccctttaagactcaactctggagtctcaagccctagcaagtccttcctcattccctaccaatcacccagagaaaaagagcctgctggaacactcactccccaccacactgtggtgcaagcttttaattctggggttaggtctctcaagagaccccagaagaccacaggctcctcatccagtagggactccctgtctccatgtctgcaatccgtgcactaagacagcctcctgcaccgagttcaagactcacatcctacctgaggcagaaaaaagcgctgatttctcctccttggagtagatacaatgtagacactagtgagaacccgagtgagtgaatcttctccaggagtctgaatggtgagttcttaccgggggttttcaaagtttccccgacacctgcccattccagaacagctatggtgcccacacatgcccggtagtcctctcccctctccacatgctccctgacagagacacctgactaagcagccacctgctgctactaggatcgcaagacaggaggcttctttctcccaggtaaactccttcaaaccaactgccaaaactctacagataactcctcaccctgtgctcccgagggaggggaacaaaccccaccagaggcttctggttctgccgtctgcacgtggctgtttccagttcagcagcacatgtgtgtaggggtgctcacgtatgtgtaggttcgtgtgtgtgtgtgtgtgtgtgtgtgtgtgtgtgtgtgtgtgtgtgtgtgtgtgtgtgtgtgtaatccagaggacaactttggtaagcactccccagtcatcatccaccttgctttttgagacagtctctttctggtctggaagttgccaagcaagttagtcgggctagccagagaatcccgaggatggtctgtgtctacctcccagctttgagattacaaacctgagccaccacgcccagcatttttctatgtgggttctagggacaaaacctggctccttgcaagacgttaccaactgagatacagtccctagaccttaaaagtttgataagtcaagcctggcagtgcctttaatcaaggcacttgataagtcaagtggtgcatgtctttaatcccagcacttgggaggcagaggcaggtggatctctgagttccaggccaacctggtctacagagtgagtgccaggacaggctccaaagctacacagagaaaccctgtcttgaaaaaagaaaatgtttgttaagttctaaagttctctacacttactatcgattcaaaaatcaaggcggtaaatcctgagaataatggccgagtggggatctaagattagcaatactcaccaggagggttttggttggaaactgtctaaaaaggcagcccgcactgatcctgagagctcctgctctgcctgatagagctgccatctatcacctgtctcagatactacacttatcagacgcacacacaagaatggcatctgtcaatcaacacaaggccatactgcccgggtacacaaaagtgagcgtgctgtcgttatggaaactctaggcaaccatgcaaagagccagttagtggacattcaccacatccctggacagggtttgctagtcctaagtggaaaagttggttaacaggtccaagtcattaaaaaaacaaagcactcgggtggtctcacttgttagttatcacagactaactgcctctcaaacacacttacaggaaacccatccccctttgttagtgtaagtgttactttgtccttgtccagacttgtggtcgggcagagggtgcagggctgtggcaagaatctggttaggatctaaatggcagggacagtcccaacaaaggcaatcggcaggactgactacagagacctctcttgctgcctcactgactcagtagacttaaaatgcatgtttcctgtagtcagagaggaaggaattgaacccccagggaaagcagcatccattttcccctagccccatcgatcctggaggcgaacaattgcatctgaactgagaaaatgaagctcactcactcaggtccagtgactcttaactctaacaacagtcagtggcactgcccacggtctctgaagggaggaacacattacctgtatatcactgcctgtcttccgatcctgttcctcacaaaaatccccataaagaaaattccaaggtgcatgctgttgccttgattgtcctgcagaagagcacagaaggcatttgttagcaccacgacttctcagaaccatcacaacagccaaggtcaaacagcccagagtctgccaagagaccaatggagatagaatgggggtggggggtatgctgtgcttgtgtaaaccacacagtggggggggggtgtgaaccacacagtgaggcgtgtgtgaaccacacactggggtgtgtgtgaaccacatggtgaggtgggtgtgtgtaaaccacacaatggggtgtggcatgatgtttgtgtaaaccacatagcggaaaattgtgcgggctttacatagaatattctggcatttgaaactggaagccattattctaaatgaataagaaaggcacagagagacaaatactgtgttcacttagttggagtggagctcatcagagcagaggatggggtgcaagaacagagcagaggatgagaagctgcgagccaaattagagggacagatctggggatctactgtgctggctgtagccagtagcaatatgctactgcaagctcagattccgtgttcaccccaccaaaaaatgcgaagaccgtgagctaacacacacctctccatcccattcctaatatatgtttaatttctgaaaattttaaactgtctttttttttaagatttatttatttattatgtatacagtgttctgcccacatgcctgctggccagaagagggcaccagatctcataatggatggttgtgagccaccatgtggttgctgggaattgaactcaggacctctagaagagcagtcagtgctcttaacctctgagccatctctccagccccgccaattttaaactgtcttaatgattgctttatttctaaacaggaccttaatatatcccaaactgtcatgaagctcgctatgtagccaaggtttgactttgaacttctggtctttctttctccatgtcacgtgctgggattgcagacaggcaccactacgtccagcatacgtggtgactggaggcaacccagagctttctgcatgctgggtaagcactggctaaaccccacaccaaactctccttcctgcagcctctgcctcttccaggctgctgggctcttctcccatcagcccctgtttacaacactggggcgggtattctgcaaggtgatgctctgttgtccacactgactgtggacactcgatggtgactgggggctttgtgacacaagcaggcctggccacccatggggccctctgctaaggaccccagacttgtcttcagcctggtctttgggtcacactgcctgagataggtggctgccagggctacgagaagagaatgggcacagactgaactttggagaagttttcactaggttccttgctgtcattggagcaaggtggcgggactaccacccccagagacagggaccatacttcaaagtcgacattacaaggcttctagggggcttgggctaagccactggtggtcaacccaggaaagacatgaggagagaacaggtcaggcacagtggtgcaccccagggaccccagcattcagaaggcagaggcagcctgagcaattccgtgagctgaggggtgggggagggactggggaagaataaataacatggtttccacactgaagaaaagccgcaaggttagtgacaccacagaaagatgccagtggaggactaaggtgggggcatgagaagggagggaaaagagaccctacaggaatcccccagggtgcttcgcctgcaggtccacaccagagtcaggtgtaaaagtgacccaggaggggacactcctggagcaagacgattgaagaacacatagcagggatgtccacggcagccgcaccacactggactccgcaggcatcgcactgcaccaagctcaaatgctggggatcctgctgtggacagttctggagctgcaggcctgggttgagccgtgtctgagcaaccttctatgagcccacaggctccatcagtatgggagcagctcagccagaagctacatgagtgtatgtggaggactaggaagggtagaaggtgcccaaggagggctggagacatttggggcacctgtgggaaagttggctctaagtggaagtgcacacagggtgatgtactccatctcactatctatcctcacacactctgctgtctgcttgtgcaaacgtcttcaaggcaggccactcccaccgccactatcttttgccccccccaccccgagtcacccagcatcatggggtctgtgggtgggccacctccatcagggacagatacacgggggaatctagcatctcagcaaagtcccccccccccgaagatcagcactgctggtcctcccgatccaaggtaggcagctgacttcctgaagaatctactagaaactgaagaacctgctaggaagacatcgaagctctataaagtagaccagcgctggcttgagtgccctcccttctttcccttcttatagttcagacactaaaaataagcaaatgatgacaaccatggaatccacaacttccaggcagagaagtttgtagaaatagagaaaagtttactgattccttttcagtgacccgaaatatcgagactatatatgggctgctctaagcgcgctgcagatggcctcgccaggcattactgcaaggaaaatggattacagcccgaccaagggcagccattagagaagcaaaagaaaattaaacaaacctaaaagagagccatttagcccttttcatgagatgcggccacctcgcttgatgcggcctcgatgctcacaggcagttctcattaacgcaaattgcaagcaaacaacagagcaggcacagagcggtgtaaagcagccagcggcgccaacaccgggtgaagcgtgtgtgctgaaatcaggcatctcccagatggctggggtgtgccagccacattaggcttctgacagaactccatcttttgaagagttggtcagcagagagaagaaaatgagtctggattataggctccatgatgctcccagccacacccactccagtaggcggggcagttaacagagaatgtgaggatgtgccgtgctataacgatttgctaggcatggcttcctcggaacacccgccacacacagctctgctgagttgggagagacaataaacgccactgcttcagtctgtctcaccccacatccaaagagcacaaaaaagcacaagaagaagactgctagccagcctcgctgtccacggccacaggacatcagctacttgtcctgttgtctggccttgacacccgaaggtgaggggcgcactggtgcacggactcgcttagatgaccgtcctagcagatgaatacaatctgctgaagatcaaccccaaaatctctgagctcagcaagagcattcgcttttcctgaagtgggcttctaaccctgcctttagaatgagaactgcccccagcccgccccccaagcccattgtttgaaaactccatcccagctgggagttctcctgtttgggaaggttatgggaccttgctggaggaggcgggtcactggggaccagacttgagggttactgcccaattctacttccgttgactctgcttcctcgttggttgtttaagcactgtgcccagcggcctcagtgcgttctccagcgccaagggctgcaccccgtgaactgtgagctaaagcaaaccatcctcccacaggctgcttcttgaagggtctctctttttttttttcctttttgacatggagggaacggtaactaatacatcagctaagctcacgtgacactgagaagggacatgctctggcccgtggcgggaaaggtgtgttaccttcaccgggaaggtctcctgtccaaatccatccaagcgctcgacttcgttgatgtacatgagctcggcttctgcgggcaggatcccactacaagcaaaacagcaccagaggaggaaatgggtggcagtacaaggtcagcggaaaacgccgctgtactaacggcaaatcccagagctgtgccacgtgcagccccgggctccggggatggcaatcatttccacctgggagggtgacaccctgttaaggtggtggcattagctttcagtggccttttacccaaaacagaggaagtaaaggaagttaaattactcaattaagagacatagccttaaaagcactattagacacctccctgtgaacaatgctttccgctttaaaaagaagctattttgctcataactatgaaattttctgcaattttaaaaaggaaaaattataaggaggggagggaagggataggaagagcgcatggagagagaagagggatggggtgaggaagcaggggagcacagctctccccacaccacccccaactccaagctccacacagaacaatagcacagagcccagacacagggtagaagcaaggaaccagtgacccaggctaggggtagggcagagctatgaaggccctgccccacagacagtgtgctgtgctggctggacagattctctgtctccatctgccttacctgtgggctttgtgctcctgggccaccttctgggtcaactcctccagaacagcttcctccagggccaaatcctggaagcacaggaacacacaggtcagggatgatacctgtcagtggctccctggtcaggtgtccccagtgacacaacccttctctctttcctgcagaagaatgggctcaagggtctggtttctgccgctgcacacagctcctaccataactctttgaacccaagtagcatagctcctacaatagcctatggggcccagacagactgcatagatcctaccacagctggtgggacccagactgcacagctcctgtcaccatagccactgagactcatgcagcctattttttttcttctttcctgcctgtctgcttcccacatgtacttttaataaattgcttggtatgtgcttgtgtagtgtgtgtgtgtgtgtgtgtgtgtgtgtgtgtgtgtgtgtgtgtgtagatgacaaaaaatgacctcagctcttgatcctccatgtaggccaccttggtgggttagttggtttttgttgtttgtttttaaacacaaggattctcactagcctgaacctcacgggggggggggggggttaggcccattagccagaaagctccagggacccacccggttctgcctcctcagcactgggattgcaagccagctttgctgttacatgggttctgggaatcgaactcatgtccttgcaagcactctcctgtctagccgtctccccagcctgtggctgtgtgtttttaatgattagagtaggagccaatgtttaagagttaagcactagaatcgactgtgccaggatgctttgtctacctctaaaattccaggcaatgagtttaaaactgcatgatggcagagccggctccttctggtgttacttgctggtcagtggggatggggttgaaacacacctcagggaacttctgtaggactgcatgtgtgtagttgtcctccttagtgctcagccaaaaggaacacacggctgtcaggtgccaagaggggaagcacacatttctgtcccctgagctatcaggtgatggcaagagtcttctagccacaccctgctgagggctcctctggctcatactgtccggggtgcagggctgaggttgaagtctggacggattcataccaagtgtcagtaaatgtctgccatgtaaatatgagaccctgagttctagccttggaatctacgtgggaaaaaaggtgggtgacccgtggtctctaacaccagtaccagggtggtggaaactggtgaaacacatggcttgggtggcacgtagtctgggaaagtggaaactggggctcagtggcctgaaaatgtagcctagtggtaagttcctggcaaacgagagacccaaggtagaccagcaccatagagataatatccagggctgacttgtggggcacacacacgcatacactcacagccacacacacacacacacacacacacacactttaaaatagcatttatatagaggtttgccctcaatttcataagccatcatggatgaaacccttttatatcactctcaaagtggactcttaactattaagaactaatccatctagccgggagaggtgacgcacacctttaatcccagcacttgggaagcactctgtgagttcgaggctggcctggcctacaaagtgggttccaggacagccaaggctgtttgttacacagagaaactgtgtctcaaaaacaaaaacaaacaaagaaacaaacaaacaaacaaaagaacaactccatttcaaaacaacactgtgagaaattggtgttgctcaaaactaaaacaggaggcttatgtcctggaagttctgctctgtgggttccagcaggttctaagctcctgggcaacagtgcagaagaggtggggtgaaaggggctcttcattgtttgttatgttgctgactgacatctagccggccactgagatgacccaactgaatcctgggaaataagcaagcttccaattgtaagacttcaagggtgctgtgtgcctcagacacagcagcaagcatctcaagccgcaccaggtgctgattctaaaaggcacagaaaaacagaataaactgaagtgaagatcaaagggctctgttaaaccccagttccaactctgaaaatgcccaaaggcatcttctgctattacactcagcccaatgcctccacctgtgtgtgggggggcggtggcagaggtatgtacaccccagagatgtgtgagtgtggcagtgggtgaatgacaaatggcagggtgtgtgccacagccatacacctgtggacgcctgtgtacacagctttgttcttttctctgctgaggaaatggcatctgacaactcggtgactatggaagatcaaacagggccattcatctgcctcccctcccccagcacaggaatgcaggcttccctttgagagctccagcagaacccagcagaaagtcgacaactttccagggctccccaccgcttgcacaattaggtcaacacctgggcctggcatctggacctttcttcaatgggaccccagccactccttccagatctcctcccctgagagttcagagccctagcaggcaagcttctgttctcaacacagcttttaccgtctctggttacactcagcccacacagtcccaccacacaatgggaaacgtcccatctcactagaaatactccaggtgccttccctcccctggacacggctggtctgctgtggggccttgaacatccctctgtctacagttatctgtacaccacactacgtcattcctcctttcccttcaccggctagaatctgggtccctcacgggcagcagtaattctcccatctggtaaaaggtcactcatgtcacggggcttttccacaatggctcctccaagttcataataccaagtaagtggtcaataaatattggctgaactgaacttgctgtacggtatatgacttctgtattgttagacaagaggttttgagtaatattaacagtagtttgtccttctgcttatcctgttgtcttcatttcaaaatgcagacaatggcattaatcagctctgatttgcacatcacagagtcactgtaacagtaacacaaccaaataacaagctactgagaatttactctggacagagttaggtatctcatatacatgttctccttcatcttcacagtggggatgggtttattctcacttttgatgagaagagcggggctttggaccatcagctaacttgccggaggttgtgtggccggtaagggtgctagcccctacgtatcctcagcaccactcggcaactatgagtggtaaagtttcagaccacagtccacccaggacaagtcaccacaatggtgagccgaggatgtgtgctcagaaaagaaaaatgagtgctgtaggccaagcctagaacattctcagttcagccaccaagcatgatactcatcactgcccagggagacttggagccaggttaaaaaacaaacttctgatctttcccctagacgcccatgtggctgctgagcagttaatatgtggccaagactagggaactcaacctctgattttatttaatctaaattttaatatcaacatccccctcttctttctttcctgtcctgatcataccttgtcccctctgctctacctccttcacatgacgtaagacgcaggtgacatcacagtcatctctgagccttttctaaccctgaaattcctgtggttcctcctcatgtcaaatcctgattgtaattcctgacctatgtatggaattgccctgatttgccaaatctcaccctggggacattcactgccatagttgttgttcttgtacagcttcattcctgaacgtctattacccatgtcagcatttgggataaaacaaaaaacaaaaacaaaaaccatgaaggaaagcaaggtgagtggctgttcctaaaagcagacccagcacacagcacccagggctgcttgcagctcagctcctccacaggtcaccttctcgatgtgttcagtcacccccactaaaacttttctcagtgaagccaccaaccaggcaacagaattcccaggggtgacacctgtctgtcgttcaatcagttcaggcacgggcagttttacatcactgactcattccagaaacaagtacgagcacacactgtgtgccagacagcagtgggacacggagactctgcttttagggccccagaccaggcattctaactgacaaaaaagtaaataacaatgagcaggttcaaacgcagaaggggctgggaagcgctcacccaggtgccagcgcatgaacaggacatggctgctggctgctggccacagatgggcaggcagtaaggcctccctgaggagtgggagggggacactgacctcaatgacagatctggcagagcccttgccagcaggggacacccagcctccaaggcctggggcagtgcggtatgtttggaggagccagactcttccaaatgaaaaggactctgtagacaagtgtcttcatgacagatactagccgtatgtatctatgaggagagcttgtctcttccgttcctgccctgtgacactgccaacgcacatcccacaactgagtggcagccgcaggtccattctccccacaccctcccaaccgctctttgacagcagttatcccggcaggaaagaagcagtactccaaggaagtctaaacagatactccctcaccatcagagatgctgagtattttcatgtatctcctgggtttttttgtttgttttttaatcttcccttgagaaatgtcaaattcaagttccctgtccattctgtaatgggatcctgtgttttcttatcatcacattggagttctactgatttggctacaagccccttgtccaaagtatgatttacaaacattttcttggtgcagaaattctttattttgatgagcccctactgccttttccgtgcttgtgctttagaggtcatatgtggaacaccgcagccaagacaaaggtctgaagtccctctgtcttcctctaacattttaacgtctcagggcttatgtctgtatcttaatccacttggaactgattggtacacactgggtgacgtaaggtcccagccccatcccgtttcatgcggatgccacactctccaacacagcgtactgtagacacttcaacccttgcttatccttgacccctttgacaaaaattggttgtacgagtatggacttatttctgggctccattccaacccagaggtcaatgtgtctgtttataagccagcaccacgctgctgtcagccaccatcacatggtgggggacgtccttctgtgtatgtctctttttttttttaaagattttatttaattattatgtataatctgcatgcatgcttgcacaccagaagagggcaccagatctcgttacagatggttgtgagccaccatgtggttgctgggaattgaactcgggtcctctggaagagcagttagtgatcttaacctctgagccatctctccagccctgtgtgtttatcttattggttgttgaataaagcactgtttggccaatgaggcagcaagttaggcaggactaggagtcaaggagaatgctgggaaatatagtaaagtcttgtgatccaggcaggaagtgacatagcaggcagactcagaatataagcaaggacaagcaggaagtcattctcgtcctcttcctctctgtggagcctccatgtgatccactggcaagagagggtgtttacatccggcgtcctcaataagataagtcttataaaatataaagattagtagttattgttgataactaagactgagctagcagataagaagtcctagtcattggacagcagcattgtacctaatgtaaatctctgtgtgttatttgggtcacccacgtggtagcggggcaagagcggctttgcaaaaagacttatcgttacaatcacgtggcatctgcatttgggttaactacagttatgaagaaacgccatgaccaaaagcaagatggagaggaaagggtttatttggtctctgcatccatagtccagccctgtagacagtcaggacaggaactcaagcagggcaggaacctgtaggcagaagccaaggcagagtccatggacggggtgctgtttactggcttgctccctatggcaagactgctttggccacttggggatcttttgtggctacacatgaattttaagtttgtttttcctatttctgtgaaggatggcactttgattttgacaggggttgcagtaattctgtaggttactttgggttgcatgggcattttaacaccaattcttccaagtcatgaccccagaacatctgtttatgtaatcttaaatttctctcattgatgctctatagctatcagtgcaagagtcctccagctccctgagtgaatttattcctgatgtatgctcctatacatcagactggtttctgtatatgctcaccaatttccccattgttgctggagtttcttgtcccgccagatcctgtcaccctttagctccaaataaacacaaaaatactcatattaatttataaactgttggccgatgggtagggcttcttattggctagctctgtcttaaatatttacccatttctataaatctatgtatttccacatggtcttggcttaccagagaatgcctggacctgttaatcctttggcggctgcatggtgtccccagcggtctcactctgcctacctttcccagaattctcgtctccaagtcccgcctatcttcccgcctccattggccaaacagtgttttattcatcaaccaataagaggaaacataatacagaaggacgtccccatcaccccatctcttattttcttttgtggttctgaggactgaatccagggctacagaagctcagcaagtgatctacaaatgagctacctcccagccctcgctcaccactgcattcaagtggtactaacaacctagctaaaataatgaaagcaacaataaatgaacaaatgaagacttgcacaggaaaggaagaggcaaaacagtcagtctgtgtttgcagattacaggactgtatacacaagtacagattcatcaaaagagagacaaacactgttggaaccgataaattaaaaatcaacccatgagacgtggtgcaatttctctatgccaccaaggttctagctgtgggggctaaaataagaaagtgtcttgtcgtgagaagaggccccccccatacactcctggtatttcataaaaactgtccctatatttaagtatgcagacctccccaggaagcacagaggcactcaaaataaagaatgagtccaaggaaagaaaagagaataaaaaagcaatgaactcaccataggaaacaggacatactctcgtaggaattcttgggaatcaaattggttatagtctccaaaatccgctgagaagacagggaaacaagagcatcgttactcaaagatagagacagaagaaaacatggcaaacttttgcccacatttccctgaacaccactaaacaagaccggtgccaagatgtgtctgctgttgtctccacttttacctagcaactatcggcactggcatgtgaaccccactagatggtttttaggaagagtggggaaatttggaagtaaaccctaaaggctatttaaagctttaaaaccaacccgtgtatgtttgtttgttgagtgtgtaccaggttggtttcctctatctgtctgccaaggggactttctaagtcaaggttaagatggagaaaagtgtctgtaaatgcatcagcagtggaaatccccactgtgaatcacccttggcaagcaacctggaaaatcttcacacctcctgaacacatttgcatgtcacgggaattctgttcccggctgccatcccacaatggtatgctggggcacgtgcaaactgaatacacagaaataccttaacttttgctgcctctgcgcacagaaatgtcaacatgacagagtcacagagacagtgatgattccccctacaaacggattgcagctatcactcagatgaggagcccagaagagcaaagacaacccactaaacctgcttccaagtccagtcacgtgatgtctccagtcacctcttttacttctgtgggcatgagtttctattggcccaataggaattgttaggagtgtgtgtgtgtggggggggggtgtgtgtgagagagagagagagagagagagagagagacagagagagacagagacagagagagacagagacagggagacagagacagagagagacagagacagagatgcatgcacgtgtgtgggtgcactcttccacgtgtgcatatgaagacaagaagacaaccttatttaagaggcagggtccccccactgaatctcaagttcactgttctatgaagcaacccctaggatccacctgtctgtgttctccaatgcatacacagatgtgcccaaccttattcagttcttgggatctgaatcaggtcctcatccatgcagcagatcactttacctgtgaactatctccccagcccaggagaaagatgcttcaaacattacattgttaaaggaagttttaccagactggcaaaatagttcacatcaaggagccaataaaaagggaatccagactgagtccactgacttcctcaaggatcttgcaacacccaggatgctcaggacgcccggaatacaccaaatgtgtggacagtgagaggaggggtgcacacagggaacgggaaagaaagccttttacagaaggaaggcacaatttgaagatgagggcacactgggttttctcagtccgctggtgttattgcaatgacccaatcactagtgctaacatggcaactgcccaccgtttttcttccctttctgctccttgggtggacagaggaatgcaatatattttggagcattttcacccagagtgaaatgtcataggaagccatctctccagacattagcactcatagggttcaagttccaagtgtgggacaggaagtccagttcatagcccctatatcaacagcccacactgtaataactctgcagctagcaagaaaagaagaaccgaaagggaaatcagtttccttccaaacgttacatactctcttggggttggagaaatgactcagcagttaagaacacttgcttctcttgcagaggacatgggttcagttcccggcacccacgtggtgcctcacaaatatctgtaactacagttctagtggatcttctgccctcttctggacgccccaagcatggcacacatagtgcatatacacacatgtaggcaaaatagtcatacacataaaaaataaaaatcttttaaaaattatacacgctcttattttcaatgtgagcaaacacacttaaaccaccatttctggaaaatggctcagtggctaagagcatttgctgttctcctggatgatctgagttgggttccaagcacccagaggtggtgcttcataggcacctgtaactccagatccaatagatctaataccctctcttggagctacacacacctggaacccactcacacatgtacacagaaatgaaaattagaaacagaaagcacacttaaacatagaaaataacacattctacaatgtagagaaggttgaaaatagctggacaggctgaaagacaattggtatcccctgtcacctagccagcatcgatttaaactacagaatgctggttaaagctattgttcttaagtggtgacagtaactcgttcacaccatgaggatacagaatatgaccacaccatacagtggaataatcctgagacaacctctcgcacactctgcagggcagtctcagttacaggcaggatttaaaaactatttcttcagttagaagcataagggaaccatagtcaaacaagcatgactgacttacaagcagcttggagaaatccaccctcttgccaccccaaatcactaacttttcatcttaatgcaaaacatcttgaaatgaccaggaagcctcagccagaggtcgcttaaccgagtctgttctttctggaagagtgtaccgaagcagataatgggattccacagatgccttaccttgcacagctaagccagccagccggatcacttgttccagggtgcaccgtaaccgcccttcaagcacatcctttttgacttgcaggtaatactgatacctgttccgggaagagagaacaaccataagcacacccacacaggctgggtgttcacagcagatgtacaggggacactgatggcgtcatctctacaagagatagacagtgacctctgcccctgtgtccctctgtctgacgtcacaggtgctgaagcaagttcactatgagaacattctcatctaacgctttgtttgcgagccctcaggatgaactgagaccaagaatgtccttgaaacactccacaggacctgcgttcaattgctcaattgtcaatttgacagaatctagaatcccctgacagatgggtctctgggcatgtttgtgggggtgccatcttgattacctaattgaatacaataaaatataataataataataataatgaatctttaaaaaaaattgataaatgcgacagtctggtagaccagatcactagttggtcacatgatgtggaattgtgttgaagctttttcagagctaggcttcacctcacacatctgagacacatgaaaaggttgctgattttagctttccagcctggagcaccctttgcaaaagcagaatgtagacagcaagggccgccacagtccggtctctgggcaggagctgcaacactgcacgctcctcctgcttccaaagcactctctcagagcgacccggaccttcagacagctccctgatccacctgtttacttccaggacacagctactgcgactgcactctctcagtcatcacttcaaccggactgcccctgcactgccacctggtaaatactgactgctcgtgggctcctggtaacaattactctgtattttaacttaactttgaggactctgtctgggaactcaaaggtcacccaaagcctagtttcctacagacagacaatgagtagtagaaactgcttatggttaagtatacatacactatcacaggtgctgggcctagtgcttcccagaggataagacactggctctttgcacagcccagcccagcaaagccccaccctcctcagtctacagggtggggccaaaaaaaaaaaacaacaacaacaacaaaaaaaaaacaggctaatctttggtggtaaaaacctagactccaatctgaagggagtcacttaataaagccttttaaatcaaccttaatgtgcaacagaaaactaatttttgttttctattcccacctgataaattcataaccatttttacaggcttcaccacccagtcagcagttttcctcctgtccatagtatttggctgtatcaacgaatggtctccattgagcttgaggccagtcagcagaagacctcttgtctacttgtccatcgcaggccaccctcagtgacactgctctgtccttaactgtcaccacagtcctgattcctcttaccccaagtcctagcacacaggaacggaattagacacaagaacttatggccaaagttatttgctggctatgaaaagccacttttgtcaactctgaaaatgctcagactaacggggaggaaatatcatgatcagtgcaaaagccagtgaaatgaagggcattccgtgtgtgtgtgtgtgtgtgtgtgtgtgtgtgtgtgtgtgtgtctgtgtgtgtctgtgtgtctgtgtgtgtgtgtgtctgtctgtgtgtgtgtgtgtgtgtgtgtgtgtgtgtgtgtgtgtgtatggtgtgtgtgcgctcgagtgcgcatgcgcacgcacctggggttgggggatggagaaaaagagagagagagattcttagggacagttcttggcagtgggcaaagaaggccatgatttgttccttcgtgggaacctgaacaaataacatcaaaacacaactttatatgaacttagaatcttgtcgaaagtaaatcaaaatacccaatactaagaatcctgaatggccacagtcatgtcctctggcgtaaccatttcctctgtgtggagcatcaattctcccattcatatttcccagttgtcatgtttctctcaaagagatcagtggtcccccctatagtggtccacagccaagcctgcctgtctccccgctgagtgcaggctacagtcataaccccggttcctcctctgtattccagggactccaccatgacttcacattacccccttctcgtgaaggaacacacacaccctctcaactacaggcaaagctcggaacaaccttatttaaacacacgaaatgctggtgatgctggtgtttaaaaaacaacatcgggggtggtggaggcatggatctgtaatccagcactccagggactcagacaagagggtcacaaattcaagaccagcccaggctctacagtgacgtctgggctagcctgggctacacagtgagaccttgtcccaaaacgaaatgaaacaacaggtaactgacaacgcaccatattgttgcacctccctggaggaagctcagtgagtctgagaagggagtgaagcctgtggctccagagggatgcttctcatctcagagcacctcacggcctcctgagttctgtgtttggtgtcctccgccatcttgctcactgcgtccctgggctagttctccaggaaacagcgcctcactcgctccaggtaaccttctcttcaagagaccctgggaagtgcctaggagtctcttgtagaggaggctttcatctctgcaaccccagcagttcttaaagggacaagacgcagccagggagagggtccttaagtcatcaaaccccttttaagcaccaagagttcactgtgaacgcagttgcgtctttgaagatgagccacttcgagactgaagatcctactttcaagactgagggaatgagagtggagagagagacaagcaaaggtgttagctttgagctgagggccccacatgtctctccagtcatgttaaagggcaccaaacaacaaaacccgctaagaacccaagagcaggctctcgggccagaaggtgccttcagatatatttaggaaagctaccgagggattctgaaaactgaccagaccaggtggggagagttggaggtatctcaactgggagaggagacaaaagctcacctcatcctagttacacagcgtttgaacctttctggtgacagcccttctcttctcctctgtcatggtggcttccatttattttcattccttcaagtcagaaggacacacacgtgtatgctgtcatctggggcaggaccaggcctcagtctccgcgtcacggggatcacagctggccacaaccctggccagcactgctctttaccgtgctgtttgatggggctgtctttcagccctgggggaggggagaatgtttctaaggatgtcctcacattgtgtgccagaactgaaactgtttcccatgtcactcccagaagtgaaaatgggcaccaaagacaccgtcacagattcttctggggacgagatcaaagaccaaggaacccaccaggtccacagacagcagctccacttctctggagcctcacactccggtgcccacccgcatccggctctcctgctgtcgctggttttcagacagggtttcatgtggcccaggctggcttctaactccctatatcaccaaggatgaccttgaactcctgttcctcctgtctctaccctccaagtcctgggaatggaggcatgagcgaccactgctggtatgcagtgccagggatcaagcccagggctgcttcacactagggaagccctctatccactgggccaaacgcccagcccacgtatgtggcaggttccattcaggccatcctgtgacaggaaacagtgactccagtcctgcagcaaggaacactggagcactcctcatatgtaggttggtgtaggcttgtgcttggatgcactccagagctgtatgctctagcctggaagccatccagaccacaaaggtctctgagaagccatagctagcgatgtgcgcactgtcactgcatgagactgtggtggttactagtgagactggaaaaaaataagaatgaaatttggactaatgtagaaattgtttgctccgttcaccttcccaccaaaagcgcctctataaaacacaaagctggcgtcctttaggatctgagagagcagagacggcattctgtttttagaatcattgggttcctctctgttttggttagagatacaactctgactgcagtaaaagcaaaactgtgggtcctattttggaaacatacaatttcatggaagtacctccaccctgtcagcactgtgggtggaagggaaaaatctagccagccaatcctcatgccaggaaataaagcacagccaagtttccaaagaggtcctctttgaatctaagcttgcaaggaaatgttaaaacattccgcacattcaaagtccttgaaacaccccatctggctgcagagacccagtgactggttttaggttaagtctttggtgctccctgtaagaatggggaaaaactctactcgttgaataaaggtacattttctttggtcttgattttaatctaaagcaaaaattcatttagactagtaaatgctagtctctctgtgtgatgcagacaagggtcccagctgtccctgtcgataaatataataaccaagagatgaagaatgctatgaacgttcctattccatggcaccaaggacttttccaacttccttccccctctaagactctgaacagaaagtttgtgtttatttttaaatgctaaacttagccaagccaacggagcacttggtaatctgaaagagtggtactgagaagtccccaaaagtctctgccgcatcatgttatcctctgtgtttcaagatgtgtggccgggacccctcatcaccacttgaactcacatgtgaggaatctgaacattctgttatgctttaaggtctgactcttctggttgagaaacgccttgtggtagcctacaaagtagggcctgtcttaccgcagaaccacgagagaggcgccaggaactcaaaggctgaggacgtgtagctttgagaatgtgtttcccacccctcccccagggtaagtccctcattccaagtccagggcagcagaggatccctgagaggtgggaagagcccatcacaatagcaaagtcttcagacctgggttgccctgactgccatccgaggtactggtactctcaccacgaccagaggatggaatcagaggagtggtgggctgtaggtgctatagatgcttgtttagaggaatccccccacccctgagacacacacacaaacaaacaaaaaacaaaacaacaacaacaacaaaaccactggctgaccccatttcctgattaacagaggtgggccaccctctagcagacctcttcagagcctgtgtgactcctatctcccttcgttctcctgttgccctatctcctgggcaaagatgactgtgaggagcttcagcctcaggtgaaaagatgcagtgtgcaggggcagtcctctgattatgagtgccatgggggcctggaggcctggagacctggaagccagacactgatgctgtatcgttgatcctaaacaaataagccgggggagattttaacaaccatgcccggcccttccaacgtgaacagcaggaactatgctcagacagaatgactcatccaaccaaggtaacatcacttcttaaagccaaagccagatggcatctgagcagagccaaccacagacacaaggaaggtgggatctgcttctcagcattccggtgagcaccccaaatccctgaaatccccaaataaaaacaaaactggggaagggttgaggaggctggcccttcccagacctgtgtgtgcctcagcctgaggcagtcctacaagtgcactgtatagtgtgtttcatcacatggccgagaactctccaggcctgcagccaggaggactaaggcactctgagctatgagcaccatcctatgtctccagtgtcatcgtgcgttcctatcagctcttcccctcctccacggctgaatctagctcagccaacagctctccttatctgaagagccaatacggatgtcacaatttgcagagggacatctttactttctgtcttggtagccttcacagaatgatgggagggtcagagtggggaaaaggtaattgctgtctggattactaagagcaggtcaaggtttaaatgccatctcctggctagaaacctttgttcacaactaacagcgtcggaaagccttttttgctgcaatgtattagaaccttcttctccctgtgtgttggagactgtctgacagtttgctgtacaaataggaaagaaaggcaagaggaaaaaaccaagataagctgtcctggagtaggatggagcaagctaagttcttggatggatagaggctgggtagtactaggggcctcatcagcgcattccaaaggctgctctcagctccgggctggaaataatggggtggcccactccggctttgtcctccatgcccagataactaggcaggcatgtaaccagacctatctgtccatctccttccctggccctgagccctcaaaacccttgggaagtattccagtccctgacacatataataatgtgttgtgtgcctggtctgcgtgctatctaaaagcttttatgtttaatgaactcccagctgacagtcaattaaaagtgcaccccactctgacaactacgggaaacaaaatgaccgcaaagagaaccaaacagaaggagccagtcccacaagtgacaatggtgaccttaaaagggaaagcctgtcttcgggcctcactcacaatcacaagctaactgatgcatccgtactcgtgaaaacaaaaacacacgacgccctttcccaaacacacctgggcaggatttccctggcgcatgttccactccacagggttacaacatcaccggatcaataaccaccttctctggccagagacacctaacttcccaggaagcctctaaggcttgcaattctatccttaaaaggacaatgtttgtttaaatgcacacaaacacacaggccttgagcgctagggggaaaagaagaccaatggcagcaaatgttgcgtaagaagccaggcaagccccgacgtgacccacactctctgctcttgaactcttgagttaattataacaaattacagggactccaagtatggcctatggaggccataaactccctgataggggcctatactgaaaccccagggttctgtgtaaaagaggaattcggtttccacaacacatcacagggcaagaggggaggtcccaactccacttctctgtcctatgtctctgggcacagacaccttcccactgaccctatctgtaggactagaaaggtccacagaggcctgctttgacccaaatgccaccagctagaggacggtgtctgaagaagcccccaaaataaagtggtattggtgtcaaaataaaatctgagcttgttttaaccttccttaaaatctctcgtaactcagaaaacagttttgtagttcctaagaaagttatacagaaatattcataaccaccccacaattatgccccccccaggtacagtcaggaaaattaggagcttaaagtcgcacaaacatttgtatatgagttgggcagtggtggtgcatgcccttaatcccagcatgcacacccgtaatcccagaaacaggtggatctcagtttgaggccagcctggtctacagagaagagttccaggacaggctccaaaactacagagaaaccctttcttgaaaaaccaaaccaatacaagccaggtggtggtagcacatgcctttaattctagcactcaggaggcagaggccagcctggtcctatagagagctccaggacagttagagagaccctgtctcaaacaaaagggcacaagtacataaaaaggatatatgtatgtcatgttggtaaactataaaattaaactctgtctcaaaacgaaaaaaaaaaaaaccaaaaaaaattgtatatgaggagcttagccactaacagtgctgccggccagaccgatgaccttgtttccattcctggttcctgggatctacgtggtgaaaggtgaaaacagactcctacaaattgtcctatgacttccacacagatgctgtgagatgcatgtgcgcgcacatacacacacacacacacacacacacacacacacacacacaaataaatataatagaaaaaatgtaaaaccctgggatatgagtcaggtgtaatgccacacctttaatcccagcactcaagatgaagaggcaggtggatctctgtgagttcaggcctggattccaagcccaccgaggctacagtacagagtgagatcttttctcagggggaaaaaaacgatgactagcattgtaacctacagtcaccaaaagagaaaaagctccactgtcaactgcaaatgaagaaaagaaaatgtgctcaggatggatggagttgtgagcgtggtggggcaggctcgtaatcgcatcactggggatcaatcacacattcagggctggccgaggctactggggacccctgcccctcaaagagcacaagactggagcactggcgtgaggtatgctgcaatgaactttgagacatcggacttagcaaagggccagacacaaagacctcgtcttacacgattccactgataggaatataccagaaccccaggaagaggagaagaaaaatggctgtaggcattttagcactagactgtggagacggttgtcccactctgtgaacacactaaaaattgtgacctgcctgtgcttaaataattaaccaggtggcttttacattttatgaattaaagaaaaagagcaggcgaccaaaacacctgggattcctaataaggaagaagtctcaaggccggagcacagaggcacactgagctgcctgtttctgtctctggcctccagagtccaggcctgctctgcttcctgctggctggacttcccacgctgtctctacctgggataaccagcaggctaccctctagactcaggtttttctcttctccaaaccactccctgacacacacacacacacacacacacacacacacacacacacacacacaaacgcacgcacacacacatacacacactcacacacacaccacacacacacacacgcacgcacatacacacaatacatacacacacacacacacactcacacacacaccacacacgcacgcacatacacacaatacatacacacacgcacacacatacacacacaccacacacacacatgcatgtgtgcgcatacacacacatacacacacagagacacacacacacatacacacacaccacacacacacatgcacacacacgcatgtgtgcgcatacacacacatagacacacagagacacacacacacatacacacacacactcgcacatacacacacagaaagacacacacacacacacacacacacacacacacacacacacacacggcggcagacgttattcatgaccccacagttgttcttctagtctttagtgacccccagcccacagtacccctcagcacccccccagctctcattgctcccccagtcctccccgcccctgtattgcacagcccaggctcctacactgtctcctcgggactttccatgtcagcatctggaggctcctgggtgacacacaaggagggagagtgggaagtgagtcacttcccactaatgttgttaggtgttacgtccaggaatggcaagagaaacggctaggtgtggtgtgtaacgttgggtttcgtggtgagaagcctgaggcaggagcattacctgagaaggggggtgcaagactttgggggagcacagagaaatccagctcaaaaaccagtttgggctggctagatgatcacttcataaaagcacctgccacataaacctgacaacttatgtttaatcgctagaatccatgtaaaaaactaatgcagcagtgagcgtaatcccaccctctacagcaacactgggtgggggaagggaggcagagacaggagaattgcctggaagttggtgggccagctagccaggagtgctaatgagaccttaggatacatcctgcagaccctgcctcagcagtataggtgtgcatgcgcgagcacgcgctcgcgcacgcgcacacacaaacacacacgcgcacacacaaacacacacacacgcacacacacacacacacacaaattttaaaatacatttcataaaggcaacccactgcacaccaagtacaaaggcttaaacttttgtcatggtggcaaaatatcccagtgtgtaaaggcacttgccaccaggcctgacaaccagagtttaatccctaggatccacatggtggaaagagagaacaaccctccccatgtgcccccacatacccaaacaaatgaaggacgaggaggggggaggggaaacctggggcctggggataggactcaacactagagtactcagcaggcattcacacttggacacgagatgtggaggtgtgtggtggtggatggctgagcttacagtgaacacagagggagggtaaacttcagtgcttcatgcgaacgaatgagcaggaaacactcgggagctgagactgagacgctgcacatcaggaaccagcagccttgcaggagatgaatcaagacacaggcagcctgctcacaagccagctcccgccactcctctcaactacagctacagggcggacagccttcatccttaggctagtaataaatatgactcgactcacctgcctgaaacacacacctgcctgccctgaaaatcatgtgtccacgctattacctcccatccactgtgggaaagggagcttaagttacccttagaagcatgagtcaactgcccagggagccagccgtctttcgggttacaagccaagtttgtggcaagaggtccgcagaaatgcctgcagatgtggttagcagtcaggggcatcatgggaccgtcagcaatgcacagactgggaaaaggactaacaacagaaactcagcgaagggggcctaggctctgctttagaatccttaactaaaggcaacatcacttgtggtgacatattgtttatgatttaataaagtttgcctggggatcaaaatgcaaagctagccacagccatagagccaggcactggtgacacacacctttaatcccaggactcaggcatatggatctctgtgagtccaagaccaccctgagccacataagaatgaatcagccaaaaagaataacagagctcacgcctttaatcccagtactagggaggtataaaaggaagaagcaaagggtctcatgagagatttagtttccagtcagggagagcattgcactcacccatttcggtctggggtagaggtaaagagctagtagctggctgctttgcttttctgatcttcagtggctttattagatcataaacaatattatctccacaatcactgccaaaggggtctgtctcctgtcagtgaagtcatacacccagatcaaggaggaaatattgattacaggcttaatagatgcttgaatgaggaatgaggcaacatccctcattacttatatattccccagaaactaggataaaaagaaagaaaagtagaaatctcccagcccattctgttacggtggccttgaaactgtggatggaggtggagaagaccatttggtaccagtcacctggagacttcagatggaggtggagaaggccattggataccagtgaccttgagacttcagatggaggtggagaaggccattgggtaccagtcacctggagacttcagatggaggtggagaaggccattggataccagtcacctggagacttcagatggaggtggagaaggccattgggtaccagtgacctggagacttcagatggaggtggagaaggccattgggtaccagtcacctggagacttcagatggagggggagaaggccattgggtaccagtgaccttgagacttcagatggaggtggagaaggccattggataccagtgaccttgagacttcagatggaggtggagaaggccattgggtaccagtgacctggagacttcagatggaggtggagaaggccattgggtaccagtcacctggagacttcagatggaggtggtgaaggccattgggtaccagtcacctggagacttcagatggaggtggagaaggccattgggtaccagtcacctggagacttcatatggaggtggagaaggccattgggtaccagtcacctggagacttcagatggaggtggagaaggccattgggtaccagtcacctggagacttcagatggaggtggagaaggccatgaggtaccaggcttcttgccccctcccacaccgattcctgcaggagacactcaagaaccaagcccttctccgattttgtgaatggatcatcctggacatccaaccctcaaacacacactgtagtgtaggataagcttcctcactggccagaaggcaagtgacacgccacaccctgggatacctgccactgtgggtaaacattttctgttgagaatgatggatagaaaaatccgtcctactctgtctgcagcctgcttgggacctgaacacctccaggctctgattccctgtgtctcctgaatcttcacatcatctcagacccgcagcctttaagacactaagatttctattgacacatgaggaactgggggtgcaggagctgagacctgccagacttctgtgtgcaatgctgtgcctctatagtataggcacttctatggttcccatgtctaggagcacagatctcaaagggagaatagaaagaagagaaaaaaaaactacccaaagtctgaaccatactacaacatgaatccactgatgaaatttccggtgttggatatgaatagtttcccttacaaaatcttcaaaagtggctgaatatatcaaatatggcaataactgccaaagataaaatgccagacaagcaaatatgtcactgcccaagaatctagtatcttccatgctgtggtttctggcaaaactattcccatattttttcagcatggaaatgtctccctatctgtagtcctgtttttcaaatccctctcagtctcgagtagttgtaagtgttcttccatcctggaggtcgacttttctaaatgtctcaatatcaacaacaaaatcttctctaaaagcttctcttgttatgtatgtactgtgcaaattcctgggtgtgcacagtcatgtgtgggatgtatttgcatatatgtacggaagtccaaaactgttgtcttgagttttcctccattactccccaccttattttttttagtcagatctctaaattgaacccagagctcacaaacatggctagtgttgccagcctggttgttcctgggatcctctgtcttctcagtcaagattacagatggtctgctgtggccacccggcattttgtgggtaccgggaatccgaaatctgggtcacagcaggttgtttaatcactgagccattgcctaaggcgccaaatttttcttataaactctgaacacaaaggtaatttcagggtagaaaaatagttcactagatttaaaaaaaaaatgatgaatagaagtctcataggactgactacaaacaggtagacagcaaacctgctgaagtggtaggcagaggtggggatagctagaaacacattcctcctccttagcctgggaccaagaactgaaaactatccgttagaaatcaaaaaggaagtgtatgaagtatgtcctccataaaccaagaactcaagggcagtgccacgaagctttgacacagagtgtccaagatccctgggaggctctattgggagggggcgtggtgggagtgagtcaagccctgggggaggggcttgagggccatggacccagcccttcctcttccttcctcctcctctcagataaagaagaagagctttgctgtcacgtgctcccactgaggaacaacagggccaaccagtctggactgacacctacaaaagtgggagccaaaaataaatccttcctcttcatagactggctttgtcaggtgttcactattaatacatgtaacctcggcactgcgggggtggagacaggcatgctggttagcagggccggctaaagtgagacagtgagagactctgctcaaaatcaagataggtggctcctgaagagagatacctgaggttgatatccggtttcgggagcatctgagcacacagactcgtagagacagacagatgggctgacaggcagatgggcaaacagatggggacaggtggatggatggatgaacggggggatgggcagatggacacacacagcaccagccatgccatacagatgataaataacaacgtgaagtacattgggaatgcatggcatattaaaaccatatttttttaaaaatcaagaaatccaagaatttatggaaacagcagactaatgatgggtaccacacctttatatgaaccaaacaaaagcacatcttaccattgcaatagcaccactgaccaccaatgcatcaaggaacccgagggcagagctcctaactgtcctacaggctttagcggagcaaggcccacagcctggctggtccttttggaccatactgaggtttgatggtcctaagactgtggctttcgatcctcagctctgcctgtcccatcagctgtcccactgagttcttaccatcttaccacgccacatcctgaaactctcttcatgcttatcagagctctcgttacttccagtaaggaaggcctctgtgaactctgacatatatggacgtgtgtgtgtgtgtgtgtgtgtgtgtgtgtgtgtgtgtgtgtgtgtgtgtgtgatggaatgggttatctgaaagttactattactaattcagattggaataaaagagtctgtgactaccgagggccggctatcaagagaagtcagatcacctgacaagcctcagccaatggactagacacagcatatgaattcatattcaatactttctgatatctcagaaagatataagcatgcctatctgtgtttcttttttgctagtgtgcatgtgtggtggagcctgtatgtgaacgtgtgcacacacggaccaactcgagcacatacagaggcctgcgcgggatgccaggtgtctccttgtttgctcttctagttgctgccttgagccagggtctcttactagacagaaagtttgctttttggctaggctagtaggccagtgagttctcaccctccattgctggggttccaaacacaagtcttcacgactgcacagcaagtgctctcacgcaacgagccatttatgtttctgacacagtgcactcagaatattcattgtctcccgatggactacacgcacggtcgctaaactctgaggagagcatgggcctgaccaggaaccaagtacgctaaactgaggtctcctggcttccagcaccccgggcttctatgtcagcagtgctgctgctgtgatttacttcattttcattgaacattaaaccaacatagctctttgctgactccagttatcattggaaacggacgtgagacttctagaagacaagtaactctcaccagtgtcccatcagggtcacaccaatggcctccgccttttcacagcgggtcatctatttcagtgacatcagccaggaaaattcaagtttaactaaggcggcctgtgcttctgtcgtcctagcgggctttgtttccaccatcttagatgtgtttgcttctcactagcacctttttcggacattacttcatctccagggttccctaggaaagcatcaagtgcctgcttggttttggctaattttaagtggagtgtgctgcccgttgctctgactggcactaactcacctcagtgctggtggaaacatcaggagagatatcccctcgtgcccttcggctgcagcatggctgatgggatgggctgggagcatcaacggctgccagatgcagcctgtccctctgattcctcggcctgggcccttaactgttttcatggccgtacctggtaactccacacaggcaggcacctgtcattgtcttacttttctgctcctctaaaggcctcagcgtcatctggaagcctgcctggctctggtgtctaaggctggaggtgactgattcaaactaaagcccatcctggttcccactgcttactatgtcaaaggctcattcaaagcagcccctggctcagtctcagctacttccttctctttgacaacactcacccttccgatgccagcgatgctgttcgaccatccaggcagtcacagagcaggagagtggggagttggcaaaggctctcagggagttccaaaaaatcctacccgcaggctctcctaagtcaggagacttgcttcacctaaaactattccagggccagccaagggccggccttctgtcataagctgcaatgtggctaagcaacatccccttgtcactctgggtctgtaaataaagcactctgctgcctacgtggcactgtgtttaggcacaaaactatgattctggaagaattgtgtcttgatagacacaattcagactatggcagctcaggatttgggaggtggcgggtgggggagacagacataaaacaactggtattcattatcatttgatgtgacttgttcccacagggtcatgggcttcatcacttgtggcatcctgtctggggactgtggatcctttgggagtaggacctagctagaggaaggagctcactgggggccagagacttgaggtttatagtctgacttcaccctccttcaccccaccccatcactgccccatctgcttcctgttcctctgaggaggtagggaaggaacctcaccctcccacctccacaaagctgctggctgacatcctttcctcaccacagtggactgtgtcccctcaaactgtgagtcagaacaaatcgtcttccattgagtttcgtctacatcattgacaataagatagagccctggctaggaatagacttcatgggtcatcagagataaggcagaaactgaaactaacacctggaatacctgaacctcagctctccaacagacagcataaggacctacagtgtgacccctaaagccatgcttatacaccaagttctttagaggaggatttatagggaaagacctgcacactcagttcaagtgaaagcaactgggtcaaggaggagctacaggtcgatgtggctttcctactgtatcacaacctaaatgcctacagggccagggagggcatgggaaggagtaacactgtcggtgtaacttcggggattggaaagaaggctaatcaagatggcatcttcctgcctataagctgtcttggtttggtcgttcagaactgctcctgtaatcaccatctcctaagatcagttcaatcatctttatagaaaagcatttctgctctagcaaactgaaaggaaagagggttgacaggacggctcagggcgtaaagctgctggccatgcaagcccagtgacctcaactccattctcggaacccatgtaagaagggtggatctaactccacaaagttgtcctctggcaagccccatccacaagcacaccatacacacagtgttctttttcttctttttttaatcagcttcaaagtaatataaaagatacccttgatgtaaccatccgaacatccttttgttaggaataaaagctcaatgtataaaatcacacactttgttcagggactcacagccacgcctatcgcattgggcccacccacctgtgacacgtagcacagcacattgcacgtgagtttgagagcatcacgagcactggggacagactgggcccagccacacactgtggggtttgcagcctagactgggggagcttacagtctcgaactctacacctctcatatctgctgccgctcaggtactgtgccttcactgtgtggacacggtggatctgtcccctcccctcccactccaactcaagctcccagtactctgcccttctaggccaagagagcaaaggtccctgtggcactgactccccacatggccgccatcctaggatttttggaaaagccattttgcaatcaacacaccatgcccaatcccgccccttataatgactcccctacaaatccaaagaattctttatgaggaaaggaagtcttttaaaccttcataaagcatggcgggcatgcttggacatgatgggacgtctcttcccaaggcccctactccttccctcctccacgccccttggctaaaggtaagcgctgtggcgtccagatcattgtcttccactcagcttttgaaacaattactgtactcacaactgctagcctacctctcaccacaaactctcatcgcttcaccagttaaagctgagtctgcctcagccttgcaatgttttactaatggcccctcggagtcagtgaacgagcaagtgcaattctgaaaaccaaggaactcagaaaaatcaaatagtttcacttcagaatttcttttttcagctggatttcatgatagctctaaaaggcacattatttgtgactgtttttaaagatgttctagacaacaggccactaaatacataatagcctgggatttaatgtgtcaggatcaaattaggagaaaggcttgatgcatcgtatactgggttttgtgaactgctttgctagtgggcaaagcatacaatgagcatttgtggttaaaagagtagagaccaggctagggagacaacctggtacttcaagtgatcacagtattccaacatgaggacaagggttcagaccccaggacccacagacatcaggcaggcacagtggcctgactatatagttccagcacttggaaggtggaagacaggagagtcctgtcagagtggtcacgttggccaactctaggttcagttgagaaactgtttcaataaatgaagagagactcgggtctctacatgcatgcacacacatacatgtacctgcacatacattcgaactcaaacacatgcaaacacacacacacacacacacacacacacacacacccatacatacacacacatacacacttatacatacacacatacacacacacacatacacacatatatatacacacatatatatacacacatacacacacacatacacacacacatacacacacacacccatacacacacacatacatacacacatacacacacacacatacacacacacatacacacacacatacccatacacacacacatacatacacacacatacacacacacatacacacacacacacacacatacacatacacacacacacatacacacacatacacacacatacacacacatacacacatacacacacatacacacacacacaggagaaaaagaaatcaaataaatgactcctttgaaacaggaatgaggtttctgatttatttgattttaaaatgtttattctttttcctttcaataaaaaataaagcgtgccaaattagttatcactaaagaccatttgagtgtttgatctgcctcccaggtacaaaggattcacagaatctgcctcttgacggtcaagtctgatgccagggagtgtgcctccacctctgtagtttagtcacagcaggctccctaaacagccacctacccgcctgcacgtcctgaagacttcgtcttttatctgggagaagagaaagccagaagcagcttgatacccgtgaccctgtggcctagacacacacctgactgaactgagggcgtgaacgttggtattcttcagttaagcatgaggaacctgtagttgaaaatggaggcacactcatggggacacactcaccagctttggcccatctcaacatcttccggccaggagcagagccaggagcggagatggtgaccaggggcacacttctatttgcagaaaagctttccgcctactgcattttgtaaagtgcgtttttctttgatcacattcataatggcagactcagatccacccatcctgagagccacaggcaataacagcaacagagcaagggaagaaaacaggggctgtgctacggctccttctttgcagtcgatgtagagttggtgaaaatgtgggacctgtcagtcaaagattaaagatttgaagatggcaacacagaacgcaacgccaacttcagggccttgctgagcatcagccatgtgaccccggctgtacaggtgacagaaccatgatggcagtcatgtttatgagagcacctgacaggcactctggatgcaaccagtgacagaccattctccaagaagcagagaggggagcaacacaaacttttaaaagatgcaaataaaccatcaatcaatcaaacacatggaaatgaaataaaccctgcttggagttacagctctttggtggtaagacattgagagcggcccctgcccacatcctagaggcctagcaggaagtctagcatggaatcggtacttggtggaagtaaactggcaaaggaaggtaggcaggacgtgtggttcggtggtagagcacttgctcagtctgtacaagaccatgagttcaaaccccagcaccacaaaaggaacaataaaaggaatgcaaccgacaactgccttctaatgcggattccatcttccttgggaaagcaactgggccccaaagtcacagcttcttaaagaaagccaccttcactgggcgttggtggcgaacgcctttaatcccagcactggggagacagaggcaggtggggctctgtgagttcgaggccagcctggtctaaaaactgagtttcaggacaggctccaaagccatagagaaacacattttctgtggtttctcctgtgttcatctcctcttctaattctaagaaagtcaccttctttcctggactcatcacactgcctgcacaaagagtgagagattggactccagtgtcggctacatcttgaaagtgtctggcagaaacagaagtgagaaatgcccgcccacagtgggagcagagtgggcagcaggtgtgccaaggggaatgcatgtcctcccagaggggttctccacttaaagcccatggcaaactttaaaactccatcaggagcgatggcctagcacttaagagcacttgctactcttccaagtacctgagttccgtcccagcaccctctcgggggggccccatctactgtgaactccagccctaggaggtgagacaccccttatggcctccgtgggcacctgcactcatatgtatataaccacacacatatacactaattaaaaataaatctttttaaaagtcttcatcacatgacattgtaaaatagtaaaagaactggggaacaaaaataaagtgtaaaggaacgtggaaacatagtcttaaaaaacttctagagggaacactctgaacattctggctgtagactcatgcagtgcacacacgagagactgcaaaatctacagggaacgcagaggtgtttccagtcaagaaaggaagaagctggtaaaagcatgaagactaagttcaatcctcagagtctacagaaaaaaccccatgtacaagggcacacactactagagagggagacccctggggctcactggaggtcaacctggcctaagacccctggggctcactggaggtcaacctggactaagacccctggggctcactggaggtcaacctggcctaagacccctggggctcactggaggtcaacctggcctaagacccctggggctcattggaggtcaacctggcctaagacccctggggctcactggaggtcaacctggtctaagacccctgaggctcactggcagttagcctggtccaagatgtctggggctcaccatggcctaactgctaaattctaggtcaataaaaccctgtttcaacaacaacaacaaaaaaaagttggtgctagggagagggctcagtggtgaatgtgcttgctgtgtgtgaggactaaagtttgatccccaaacccacacaaatgccaaatgtgtcagcccacctgtaattccagagcttagaaggtggagctgggatccctgagcaagctggctcgagactagccatatcatagagtgcagcaagctggctagacagactagccatatcattgagcctggggttcagctgagagaaagaaccctgcttcaatagagggaaatgcatgacatcaactttgcgctttcacaagcatgtacacaaacatacacatacatgtgtgtgcgtgtgcatatgcacccccacacatgtgtaccccccacgcatatacacatacataaacatatccatgatgaaataaaaggtagatagaactaagaaatgacaccccatgcaatcttgactatctcacaaaacggtgcaaaactgcactgagcacacaggaacactcacacaaataacccaggcatcatttcatctcatgtgaagacacagggcttggcctgacctggctttgccctcaatatgccattgatttgaaggtgacactgcaaagaaagggccacagcatagtctaaaaatgtaacaacctaaagtctctgtcacaccaacaaacaaaaggtaattgcctctatatggcacataaagaccacagctctaaacgtgggcattcattcctggggcacaaccgggcacagcagcagcaccttaagatgtggggctggaacgggccctgtagccccaagtctcctcaacactaccacagtgtcctaagactgtctttgggaggaggtgggggatggggttgctacgcctgtagttacactatgcaaattctgtggcatgtggaccactaacagagtggacagtcccaccccagaaagtcagctaccagggcatcctgacaaaggaggctaactgaagtgaagaggagttccttttcactagaccagcacccactcagcagtgagcaatgcaagacacacatgacagtgaaaagaaaaacattcgacagttaattccgtttcagaaatcaggcatgcagtgtgagtcttagattgactcttcaaaaaaatcatctgtgtgtgtgtgcatgtgtgtgtgtgtgtgtgtgtgtgtgtgtgtgtgtgtgtgtgtgtgtatgcgtgcgtgcgtctgtctgtctgtctatctttggtgtggctcctcaggactagtctttggtttttttgctgtcctgcatttcacatggacgccgggaattgaattcaggtcctcctgcttacgtggaggaacgttactgagtcctgcctagccccctagtccttctcctttaaaagtgttcttagtatggagagcctgaagaagcccttccttacttgagggagacttgggaaaggtccagacatcaattctaagctggccgcagcgtgcgcatggccagcagctctccagctgtcccttgcctcacttacaagccatcttttcaccttctgggtccaggaaagtatggaaaccatgtgtttccaacaaatctgctgctatgaaaacacactgcaaaaagtcttcccttcaattcagggagatataaaagggggagatgcctggcagtctggagccgctgctgggggaacctggccaagatgggagggaaggagagagacacatggtggccctggcaggaggagctaacggtctcaaggctcacgggaccatcttccagttgggaatgaggctgagagctccctgcttcctaatctctttaactcctatggttttgtgactcagtctctatttgtctaggaggagcctaaatgttgtcagtcacggtcactatcagacacggcagtcacatgtctagaaccacaccgggtcatttctttttctcctctttgattctgtaattctgtgtgttctccttttgacatactgtgcatgtgtgtagaggccagaggtcgatgctggatatctttgctcgatcactttccaccttgtgtctcagacaggatctctcacaggacctggagctcactaatccaactaggctggctgcccagcaaaccccagggcctctccagctaccaactaaagcctggtccttgtgcttttgtgggccccgaggatatctcttaagatgcactcagctgtcaccttaactgactactccattttttctccagtgtcctcatctcttgtcaggcttccccatcatgaagagatccgatccagtgggtgagatgggacaatctcagaataacctcaaaaagccacactttcgatttctctacctcaaaactggctgatgaaccctgggtgcacctgtctctagccaacccttctccctgctctggagttacaggcccacactgccacaaccacattttacacaggttcagggggtgccaactgaggtctccgtgtttgggcagcaggcactttacccactgagccatgtccacaggaggaggaggaaacaaaaatttcaactgtgttgtcattttgagaaatttacaatcctgaaacccacactgttgaaagataacaaccatcctctccgtctaagcaggtcactagtgtagcttctccagggatcccaatgcccaaatctgagcaaacaaaaagttctcctgggcttctgacaccctccagaaatgtccacctgatgactgactccagggcactttcacaaacacctcttgccaccgtgcacaccatactaatgccaacaaaatgctgttctgctggtgaatctgaactttatggacatttgtgcttcccacaaggacatgggacagtgcggccggccccggggctccaccatgctgctgacttcctgcactgtgtatgtcagaccacataatgaaaactcttgccatctccacatttttctcaactttacttccatctttagagaaccatctcagtactcaagtgcaaagtccactggtgtttggggacgtgggtggggtagacaaaacagaattagggggttggtttttattaaattctagcatacattttcaacttaacatccctaagaaatacttctttgccattattcacaaaattctactggtctggctctggctatagggaatgtctggcactagctgcacgggtcaaaccaaaactcggcaggtgcacagcaactggcagacaacctccaggtaccccgccctcacagcctgtgcaccacacaccgccacttcacaggaagcctttcagttacccacacccttacgggaaaccggagggggaacacacctaccttgtggcctcctgatgaagccatgacacattgggcacatagaacatgactccaaagaaaagcagaggctcgttagcgagcttgtccagatgtttcttcagcggcttctcaagctccacccatctcgcttgctggctcttactgaggaaccaaaggccgaagtagtgtgtctagataaagggtaaaatcacatcagtttgtgctcctctcggcagcccaagaccacacagaaaacaagccctccacacttgtgtcatccgaactctgagacctggggcctacctacaaggatccacttgatacttgctcctgcgtggagcgtccaggagcacctaaacacttccgctgatggcgcatgtgggcctccataaacttgtgttagtggagggttagggtagactgggacagggctggctttgagtttatgtacaagagtagatgagcagctgggcacagagaccagaggtcaccctggggaaccccgcctcaggcgctagcccagcccccttggctttttagacaagatctctcaccggggcctgggcttcattgattagactaggctggctggctagtgaatcccggtagcctcctgtctccacctctccccagggctgggattacaagtgtgcccagcacacctggctttttcagacaaatgctggggtttggactcaggtccttgagttgtctccctagccccagggctgacttcttactgagtccagaaggtggacccgctgtgtgatctcacacagcgcacagagtgctggccgaggccagggtaattcttgtctctcccatagagtggcttcttactcacctataaagacaaaccctgccagctaggagctctggcgctacagaaagttcccccagtccaacagacctaaccccaaagccacctgctctttctgtacttcaatgagtactttgaaagccatgccctgtaccgtttcattatacatgaattacgataagtttctccccctaccaagctttgaggctggaaggctctcctctccacagctgcccccaacaccactgggggctcctggcagattacggtggcatttgatggatgaaagtgtgattgccaccctaaaactgggagccttgaccagcttggctaaaaacaatgtgccggatgagaaacaggtacgttcacgctcccaatcctgtctttatatgaacgtgtgctggggtttcaggattagtgcaaaaaaacagatcgctgcttctgaagacgcctttgtgtttcgattacgggggccaactggttgcagcgcacctggagctctgccttcggaagaatgtttttattaccaagcttcatttccaaaggcattctttctctgtcctcaccgcagctggccgcccctccacttaccacagagcaacccctaccaaaatccccagtgaaaccttggttctgcttgcctggcacaccaggtgtgccctaacctgtgaaagcctgaacaccacaggtcggctgagatatttttctcagaggggtgaaatgcttgcaccctccgtggtgctccaaagggcaggcttaggtctgtaccttctcaagctacaagatgcaatgcccaggactcaggtcatgtctctgtcaactcacacaaagctgactgagtccgttctcgcccagctgtttcctgattctgcgagtccatctgtgtctccaacacaagagatgacacagtcgaggtctacaggtcaccacacagaagggctctacagctcgtctacttctagttgttgctctctctctctctctctctctctcttctctctctctctctctctctctctctctctctctctctgtgactctacatacaaaggaacccctggattcctagagctttgtctctaagatgaagaggctgcaattcttatccataggctgcagggagcactgattacctaattaatacctgccacccacatttttggcccataccaagcacgttaccaacaggtcacatgactctcttcactggctctttttagcatcaatatagccatggtttaaacctagaaacgctcccccccatgctaaagacttggtgccggggttcccatggcctggagggggtctgccctggaagggaccacaggaccctgagcccttcttgtctcctcttgccttcagactgtgacaggtctgcttttactcctctgtgtacttacagcaggacatacaggctggtcacaagcacaagggaaaagggccaatggatgacaacctgcaaccttactctaagtcaaccttttcccccatcagccaggctatcacatgcagtgacagaaagctgacagtatagctatgagccaaaggattagaaaacaatgccaggcaggggtgaggagctggggaggtgcttgctgagccatcttgaggacctcaatttggattcctagtgtccacataaaagcctgacacagtggcacataaatctatagtactagtgagtggggaaccagccagcctagacaaactgggggcctccaagttagtgaggtcttttaaataataataaataaaaataaaataaaacaaaaaataaactagggggcaactgagggaaagccatgataccaaactctgaaccacatatgcatgcacacacccatgtccacgctcaccacagaccacacacacacacacacacacacacacacagagagagagagagagagagagagagagagagagagagagagattaaacaatgagttctgggactcaaagtacgaatcttgagccacagtaaatagtaaagagttgtaaataacaaaataaacaacccctaatgggaactgaactgtagtgttcgcatttgttgaaatagtcttttcccaagggcacaaagcagttcccagtgattccctacgcaattatcctatgaaacagttacagaactacctgagaagtggggccctatggtgaagaggcaaatgggatgagcaggcgcctatgaacacacgaagctcaggcaatctgcagtcaagggaaacattcaataccctcttgctgccacaaaaatgcacatcaaaactccacggggttccaccacaccccagttgaaatgacccccatgaaaacaatgggaatgctggcaagggtgggagggccggacacactgatgctgtgctcgaggagcctctgtggaaatcagcgtcgaggcgctaccacatgacccagggatacacgcaaagggactccaggcggcactccacagaggcgcccgctcattcgtgcgggtgatagttcgtttcactacagccgagttacagaatcagtctgggtgtcactcatattctctctctctctctctctctctctctctctctctctctctctctctctttctctctctctctacacacacacacacacacacacacaccatagtttaactgagaaagaatgttttttttcagaacacagacggactcggagagcatattaagcacgacaaaccagacccagaaagatgagtgtcactttttctttcttgtgcgcatcctaggatatgtatgtatgtatgcttgtaaagacgagcacataaatatacacatgcttacacatagacctacgggagctgtggctgtaggtcagttggtcgagtgcctgtctgccatgggcaaggccctaggttcgatgccaccaccaggacaagctgggtgtggtgacccactccatagtcccagcatttccactggacgggtggaggggacaggagaagggagggagggcggataaatatggacgaagcacatacatacctaagaatgtcaccaaaaagcctggcaccttgtgtatatgttaataaacatctttcacaaaggtttgggggcgtgggtgttcctagttcaaaataaactatccttgaaggtgtccgaggcacgcctccgtgctgccctaactgaaaacgttggtctcagttatctttcaggaaggaaagcccattcgtgaggtgtccagcttcatactggtcttacaagctgcacccaacaaagcctcctccattcccgcctgcttctctcatccctctagctgtgactccacgctggaatggacagacccggccccagcttcttacacggctttcattcaggttacggtacagcacgggtttatccggccacatctctacaagtcgcaccaaaggaaatataatctggccataccgtctcaatccaactatctgtgtaccaagcaacacctcccaccctaccctcccccacccccctacccccgcccacccgcctgccccatgcctggttcaaggaactgtctctcccaccaagcacagctatgcacacccagctcaagttcagcccagcgaacactgccacatggctgtgtgaagtgcggctgaagctggcaaacagaaaccacctctcccactcttaaaggaacctcattccccggagaggggcccagagcgccagctttctgtccaaggcaccaaacgtcgtaaggcagacctggctgaccctctggtgacctctgggcataaatcccatgctgtattttagttttaagcctgcagctctggtgccttgaattctataatgacgaagaaagaaggcagtaaaaaccggttcccagcaagaggaactgtatctctgagtcaataactaacaaccagctgagcagtgcagggagagccccaggaggatggatattttcatgtgagcatgtcctgggtttatctggaattttgcattttaaaagaagtataaatgtctatatgtagtgaaatgccagcaagtgtttgcagtggcagacatgtttgccacagtgccagccttcatggtaacgactgtggaatgatcccaggtaatgaagacgtttcagcagagagcaggacagccagtgctgtgacctgagcgtgaactgtccccacaacaagcctgtgtgtttgaacttctgatccccagctggtggcactgtctcggagaaggttgtggagtggaatattcaagcggcgaagctggacagaggaaatgggtcactgggggtgggccttgaagctttattggcccgccccacttcctgactgctctcttggtggctgtggaagcaatgtgaccggcacactcgtgctgacatgccttccccccataatgtagtctatcccttcaagcatgagcccaagcaagtcctttcttgaattgctcttccagacactgtccagtggcaagaaaagcaggagacagagcctcatctctggggaatcctgtcccttcccattctgctgtgaactccacagtgctctgaagaatagtttggagtgttgctgatatgattcctttttattgtggagctggggatcaaatccggacctcgaacacggcagacaagcggcagacaagcaccctacccctaagctccatccccagccttcaaccactcgcttatagtgagatgatgtaattgcacacactaactattcatggcagaagattgttgagggttcggttgctccagttttgtgacccatggcatggctttaatgccatctgtgagggttacacatgccgtcctggcaattacgagggattagagtcctgatcttaatgcaggcattctgaagaggcaatcagccagaagcaaaagtttagaagatctcgagttaagctccagcaggctgcccgcctcacccggtatttcagttgtcaatcaagaagcagagctggcatggccccacctgagagaaagagaggagttgcctacaagtgctgaaggcttctctcgggcatgagaaatacctcagacgcagccgtaaagcaggctctgggcagctcttcatgctacgttccagtgactctggaaagtaagtcactgtcctccatggctggagagctgtaaggccatcttgtatgcacccagtctccatactgggtaggtctggggaacacatcgacaactaacaagaggcccattctcattcttacagccagtgtcttcatgaaaacacagggaacaagctgcagctgtaacagtggcccacgaagccaagcatgactatggccaagcaagcattctcctgaggcagcgtgactccctcagaacacacccagtgaaaaagacttaggagaaaaggctgagaaataaccacctctgttcctactgaaaggaaagtacagttatcactacagtagaggcctggcacttagctagctaagatttccaattataatatccacaagacaagaaatcaacacaaaattcaaaatccacaaatttccccccacaacctacttctaggcactcttactcagcattggtacttaaaacgtcttgtatttgtgtgtgtgtgtgtgtgtgtgtgtgtgtgtgtgtgtgtgtgtgtgtgtgtgagagagagagagagagagagagagagagagagagagagagagagagagagagagagcccgccagtgtttgtgccatggtgtatgtgtgaaggccagaggacaatgtgtaagcatcagttctctccatctaccatgtggttccagggatcaaactcaggtcattggtcaaacttagtggcaagtaactttacccagggaaccatcaattttagtttgtttgttttgttttgtttttttgtttttcaacttgacacaaacctagacatacctgagatcttaactgaggagctgtttacaccagattggcctctgggtgcatctgtgggtaatttttcttaattaatgactaactcactatgggcagtgccattcctgggcaggtggctctaagctgtgtaagaaagcaggatgttcagcttattgtaagctgaacaagccaaggagagcaagccagtaagcagcacccctccgtggcctctgcttcagctccagccttcaggcttctgcttgagctcctaacagactgtaaagtggactgtaaagtgttagaacacaccctctcctgcccaagatgctttccctcaatgctttaccgcagcaacagaaacagcaaagcgacacatctcatcggcccctgggctgattgttttaaaccccaactgtggttaagccgggtgcagaactgaggcagattccacaggtacaggaatgaagttttcctgccaatcaaacagtccctacatcagacagtcacaattgttaccaagcgctgggagattaacttcaatcaggccacacccctctctgtaatgtgagctcacctttctttgatgggaaatgcacactgagtccccatgtctgaaaatctttacatatgaagacagccgaccatggaagatgaatggctacagctgatagcttcgaataaaacactcatttataaagagaaaaagaggctaaactgggtaattggtacccacaaaatacaaggccaatggtggggggagcaatcctgtgtttggcccctcctacttccaattttgggtgcaggacattcttgttggaggcatgtgcggagcctgttttttctcctttagttggggaggagctgggatggactaggaagggtcatggctccaatgttatctgtcacaggatgaaagtggaagacccaaagagaaagtgatttgctcagaggtgacaaactcagtcaggacaaaggcagcaggaaggctggaccgcaccttagctatgagctgtcaatcacacaacaatgcacccttgacaggagcttctgagctgctccctttatcctagctgactagggttgccctttgacctctcagaggaagccagagctggcagaaaggaagcagtactgcacgcatgtcccaacacccctcagctctcactgctccccagagttttgctggtagatgggagagatgcctctgcaacacacatacacacacatgcgcacacacacacacacacacacacacacacacacacacacacacaccctacccccatctccccaccctcacccactccctcaccaccaccaccccaacagggggagctgcccttacttcctcctccctgaaaatccaaatccagctccctgtgcttaaggatggccccttcatcttttttacctggatgcctaatgcagcaggactctgtgtgtgcatgtgtgtgtgagtgtgtgtgagtgtgagtgagtgtgtgtgtgtgtgtgagtgagtgtgtgtgtgagtgtgtgtgtgtgtgtgtgtgtgtgtgtgtgtgtgtgtgtgtgctcacccaagcagtgtgtggaggccagaggctgacacatcccaacgtgtccaagagctttacttttagaaagggtctcactgaatctggagctcggttctccagcagctggccagagccctggggacacacccatccatctctgagccccggttctggcttcctggcccacactgtcacactcagcctttgatgtgtgtgctagagacctcatgccttcatcctccagcagctcagcccactgagccaccctagtctcctttcaggcaggctttgaccactgtcatacaccagtctatacaccgagtgactaacaacaggcaccatcctggccttactctgcaggtggcattcagtcttcacctgtcacctaagtgctggaccctcctaatgttcccaagtggccatcaagtgctaaggaagtcactcaagttttatttaatcatttttaaagagatttaagtgtgaacaactatggattactggaggaagcactccatatttccagactgaatggcttttaagactgacaagaggaccacaaagtaagcgtcactattcacaatttacaggtcaggaaacagaggccagaagggttcggtaatttctccacagtcactctgcaagtaaacttcggaattataacctgagccaatgccaacacaacaaaccctacctgctcttacagcgatttacatatattataatgagttcatgcatatgaatgacctaatactaggactaggagtactcaaaaagcaaaatacctgactacttttccagtgctacataatttattaggaatttagatatgtttaagtatgtatactgcaaaacaccaccactaaacaaaggacagctagctagctgccactggcatggccaggacctttcccagtgagttctcatgtcagcaacccagctctactcatctgctgctgaggacagtctctggctacacttgaaaatgaacctggacagacagctcaccccaatgctggagccacaatccaaacatgaaggacagcaaggaacaggagtgttcaggaacaaaagccccccagagaaccacagtcaccctggggaagaagctgcaaggagaaaggctggaaccctgctgcaccaagtcccttccaatggggacctgcagtgtggtggagcatggctgtgatcctagctgggagtctggggcaaaaggatgaccagtcagaggcctgcctgggtcacaaagtgagagcctgtctccaaaaaccagagcacacaccaaaaagaatggcatccatagagcccaaaggaacaaatgccagttttaacagccctccctggggatgagaagacaggtctggcagtgaagcacttaacaacaagcagaggggtaggagttcaatccccagaacccacataaacatcacagatatggcatgcttggagtcccaaggattgagggtgtggagcagagacgggaggacctcttgtagactagacaatccagtgagctccaggtttagtgactctgtcaaaggatgggacagcactcctgggaattttacccaaggctgtcctctagcctgcacacacacacacacacacacacacacacacacacacacacacagacacacacacacagagacacacagacacacacagacagacacacaaacacacacacacacagacagacacacacagacacacagacacacacacacagagacacacacacacagagacacacacacacagagacacacacacacacacacacagagacacacacacagacacacacacacagacacacacacacacacagacacacacacacagacacacagagacagacatacacacacacaaacacacacagacacacacacacacaaacacacagacacacacacaaacacacagacacccacacagacacacagacacccacacagacacacagacacacagagacagacatacacacacagatacagacacacacacacacagacacacacacacacacacagacacacagacacacacagacacacagacacacacagacacacagacacacacagagacacacacacacagagacagacatacacacacagatacagacacacacacacacacagacacacacacacacacacacacacagagagacacacacaccacacacacacacagagacagacatacacacacagatacagacacacagagagagagacacacagacacagacacacacatacagacacacacacacatacacagagacacagacacacacacacacacacacagacacacaaacacacagacacacacacaaacacacacacatacagacacacacacagagacaagacatacacacacagatacagacacacacacacacagagacacacacatacacacacagacacacacacagacacatagacacagagacagacatacacacacagatacagacacacacacacacacagacacagagacacacatatacacacacagacacacagacatacagagagacacacacagacacacatacagacacagacacacacacagatagacacacacacatacacagagacagacagacagacacacacacacacacacacacacacgtacagttttatctttttttaattattaaaaagtgctttctcgatgtttctgggtcactctcactttaaatgctattttgctccttttctttgagggaagggggagagagagaaacaaacaaaagtcagctgcagccatccggaacgtgggtggctggcttctccttgtgacgcagccataaaacctgaatgccaactgcccactcaactgttttcaagggggtaaaagtgactttggtgggcgagtctctcattcttacctccccctaaaaatctcacaagggaaacgaaaggaaacccccttccccacccaaactgtaggcccttccctctggcatcagcagtggtgccctgagccaccggagcttggtcaggtcacacccacactaagaatagcaggttcttctaaacacacacctaggctaaagacacggcaggtgccgacatgttagcagatagctggttcttccaagcccccccctttccaccgtcccccccccccccgtccccaacacacacagggacacgtgctccactcacctccctcagctccagcctctgggccaccgcctcgaggcactcctgccctgtgctttccactgacagggtgcactcgatgacattgctgtccagaaggcggatccgggtaacaaagcaattcttactcaggacattgtagcgccgagtcctgcgaagcttcaggccgaaaggcatggctctgcggcccggggacgcctctcccggcaccggcgccccttagagggccttagcagttttgtgttggaacggtcacactaaggtagggaagaggtgtccatgcccaccaggccctctgcaggatggctgtggaggaaagagagacaatctgatcacacactggactgaagggaagctgtcagcggcgcacaccacaccacacgcgtgcataccagcacccaggcgggtgaagaatcagacttgagcaccttggagctcagcggctcccatgagccttgttggaggccatgcatctcactcaacctctctcaccaagtgaagcccaagaagacctgggaagcagagacgcttagcaggaaggaaggcaaaggtgcacagagccactccagggtgccctgcactcccagtcacccggccaccatgggcccctctgcacgaggagtggaaccaggagagcttgaacggctcagaagagcctcttgttttaacttcatgaagaactgcatgatataaacctcactgtgcttttgcaagtggctcagtgagaaaggtggccaccacaaagcttgataaactgggttcaatccccagggccacatgccgggaggagagagccgactcccaccagccgtcctctgatctccacatgtgggccttgtcatatccatgagcccatgaatacatttacaataaataaatgtatgtaatagaaagtgactgtaaggcaaaaacacaatatggtaactgcagtgccaatgaactaaaacctcatcttgctcctaccctacgacgctgtttttgtagcttttaaaaaaaactttttaatgctttagtagctatttactgagaatgtataatgtaaatggtgacagcaagatctaacataggcaattcctattcttcaatttacaatatagaattctcgctgccacctttgttttgacgctgaggactaaacccagggctttgcccctaccaagcccatactcacaccaggtctgatctcctgatagggaacagagaatatggagggacccacccaaaggggggagacaagaggggaagccaaaatatcctcaaatgtttactctctctgtgacctccatccctattctcccaaatatagaaattcttcagtatacttaaaaatcttactgtgtcctttccttcaacgaatacttaagacagatgtgtggaaccacccaaacaaggttctgatcctttagagatagatggcttgggtgcaaaagccctgtcgccaattacagatcactaaacccactagtaacaagactgacaggcagctggcgtcccaccaaatgaaaataacaacatgacaaacactgagaacacaagcatcaaacacaaaccagtgagtgactcgacgctttggtcaggaggcccaggaaacttatctctcagcggagccagcaacaagcaaagagcttttccatccagctgcctctcctgctaggctcagagggctatggctggccggaccaacagctaactcaggcaggtgccaacaggcttaagcccctgacagggcactgttcctgaatggacatataggtaccattgggacctgcaggaatcggttgatggataaatgagctgtcttcgatatttataagccgctccctgacagaaccccaggcctcctgaaggttgtcagggtatagccctacaacacagcaaaacacactcccagcctccctcggcaggctttgatacttgccctcggcacattcctgagtgtggcaggtacatgttttatggtagcttaaaatatgtatggccagaaatgctggcttggtaaaatagattaacatttctaaaccactttatgttggcagagtaacatgtttacttccaagccacaccaggtctgatctcctgatagggaacagagaatatggagggacccacccaaaggggggagacaagaggggaatccaaaatatcctcaaatgtttactggcgaattcccctcgactcactgaagcacaggccaggcaggctaagattcaatgcctctgttaagaaagccttaaacagatgggaatgtttgctctgccgacaccagggcatttctcttcctgggccaggcactttacatttgggtgtgtctcccttaaacacctatgaaagaatgtggctggcttggtacccggctatcctagtaaaaaacaatctctccacatattctacagcatgacacaatgcacagatggcgaaacagccaccagctccccaggcaagtgtgcgcctaactgctgttcttaaaaaacgaccagagtgcacacacagagaagactgttggttcagcagttactgtctgaggccatttggtgatgtgggggactcagctctgcatctttctacaccacttttcagctgcctttgttgatggcctccaaaacagtcttcagaagtgccattgtcagaggtggtgaacaacctggcatcatggacctagaaaatatctatttcacttaaaaaaaaaaaaaaagattcctgaatctttgatttgcaagataatctcaacaaaaaaaaaaaaaaaaaaaaaaaaagcaagaaacttggtctggtctggacctttaacaagtcaacaactaagaagagtatcaaatgggaggtggaaggcacacaagctgcttcccaggcagaaagtagagaaactgggaaacaataaaaggtgatgtgttgcttttggttaaatccagttgtggggggggggactaggaggcaactaggcaaactttaaaaaagaaggaaagagagaaaggggaaagggagacaaattacatcactgttaatttcttggtttttattgtgtgtggcacatgtgtgagtgtgcacagatgcacacttactatggagggcagaggacaatgtctggaggacctttttacatgggtctggctaccaaactcaactcctcatatctgcaaggcaagctctttgctgagccatctctgcagccccaattttctgtgatttctgatggtggaattgtagtcatgtaggagagagatattaggagataccaatagctctattgtatgtagtaaagatgtcaggatggaggcctgagagatggctcagcagttaagagcactggctgttcttgcaggagacccaggttcaattcccagcacccagaggggtagctcacaaccatctgtaactccagtcccagggaatctgacgccccctgctggcctgtatgggcactgcagtcacatgatgcgcagacatacttgaagacacacagcacccatacaaacaaaataaaaataagagaaaagtagtttagatgtcatgatgtaatttttaactgtaaattttaactggtatgtatatatgtgtgtactgtacacacacacacacacacacacacacacacacacacacacacacacacacacacacacacaccatacacacacactcaactgacagctgttgaatacaaggggtagcatacagattttgtcacactgctcctgcttctccaggcacttaaatactttcatgacagaaagttaaaggggaggtgcctccccacatagacggtgttctaaaggtgttaaggcttggtcagagggagctcagcaagcaacactattggtgcttattttaacaagttaacccgggttaaaaatatcacagtttgacaccccggcacccaaagctagaaatgcatttcctatctctttcacatacatcactcgcctcagtgaaaagcccatacgtaacctccactaccggcagtgaaggccacagagctgtgcttctagaaggaactttgggcaatcctgaccaaaagcaggtatgacacccagaagatcccaggagaccctacactgtaacgacacagtgagagagcttgaactctgctcagtgctaccacttcacggccagtgaatgagtctcaactcttcactcttgaggaaaccatctctcacgcaccaagctctgccattaactatcacacaagtgccacatagcgccacccagcacggtttgtccttcacagcagaccaacttctatcacctcccttctggtctaagtctggttccaggtcccttggccaggcttccccaagtggttctctggggctcatcacagttgccctgtcacataaagaacaaaaagcccagaactaaaagccacatggaaaggacctgtgtttatgcctctttcaattagggagggaggggaggaagggaggggagaaagagggagagggagagggagagggagagggagagagagagagagagagagaggaaggaaggaaggaaggaaggaaggaaggaaggaaggaaggaaggaagggggaaagacatagtacatgtacactgaggttccatctcaccatactcaaaatggctttgttagaaaaccaagtaatgtcagacagtggtggtgcacgcctttaatcccagcactccggaggcagaggcaggtggatctctgtgagttcaaggccagcctggtctccagagcgagtgccaggataggctccaaagctacacagagaaaccctgtctcaggaaaaaaaggaaaccaggtaatgagctagagagatggctcactgtgtaagaatgcttgttgtacaaccctgaggaccacacaagaaagggtatcgtgtgcgtatttatgtgtgtgtgtgtgtgtgtgtgtgtgtgtgtgtgtcatgctggtgaagtaacacaagggacacttacacactggtaatgggaacggacactagtttaagccctatggaggtgtctttgagaaactaacaacagactgatcttacacacgactcagccacatgtgtcactcctgggcatttgccttgaggacaccacagacaagcgcacaccagtgtttacctcagtgctattcactgcagatgaacgtggtgctaaccaggtgtccagcatcagaaacggctgatgccatgcaatttaccttctccacggcttcttttcagctatgaggagaggagtaacactgtctgtggggaaatgaatacagcaggagatgatcacggtgctggatttcatgcagacacataaaaccatgcactcacgcactcacaggatgtgtgggagcagctgctaaatggctcccaggggaatttaggaggctgttgatgtggggtgggaagatgctcaaagaacatcagacatctgcatgaaaatggccttatgtaacccacacactaacatttaagtgtgctcgcaagaaaggccaggtcagagtcctcattctaatttaaagttgttttaaaacaaacaaacaaacaaaaaacaggtactatcttatttttatctcgttaaatgtaactttttaattaattaattaattaattaaaaatgcagtggcgttgggggaagtaagctggatgggtaaaatgtctgccatgcaggcatgaggacgtgagttcaactcaccagaacccaggtaaagccgggcacagaagtgcacatcggccgccttggtgccctcactgagatgggacatgggacagggatgcatgtgcccagatgctctcaggcagctaacccagcatgtgcagtccggcagctggcatatgctgtggtaaacaacaaagagaccttgtccccaaaccaagtaaaaggggagagtcaacagccgaggctgtgctcttcacactagtgtgtggcatgtgcaagccttcgctagtatacaggaacacacatcatacctgtacacacacacaaacatgcacaaaaattacagggaacgccaagggagccaggcattggtggtgcccatctttaatcccagcactcaggaggcagaagcaggagatctctgtgaatttgagaccagcctggtctacagagcgagttccaggacaggctccaaagccacagagaaaccctgtcttgaaaaacaaaaacaaacaaacaaacaaaaaccctccaaggtaaaccatgagttacaaacacacatatcacacctgtgcagatacacacacatgcacacaaattacagtgaactcccaggtaaaccatgggttccagggaataatgacctgtcaacaagctgacccattcttaaaaaatgcgccagtctggtgggggatgtcaccgggccctgggacactgagcacttaagtagcagacacccgcactttctgctcagttttgctgtgaaccgaaaacgactctaaaaattaaaatcctttagaaaggggcctttcatggttgttgaagagttggcttagcagcaaagagcacacactgctcttgcaaaggaccagagttcagttctcagcacctacactgggcagtgaactgctcataaatccagctccaggggctctgatgccttcctctgccctccataggcacaatgtactcagacgcacaaacccatacacgtacatattattaaatagaataagatggggctttgatcaacattcaggaggcagaggcaggaggatctctctaagtttgaggtcagcatggtgtgcacagcaacttttaggccacccagggctacatagtgagaccctgtcttgaaaaactaacaacccctaacaccaaaactaaagcaaaatacatctttttaaaaataaaaatgaaaaaaccacttaaaaacattagctatgctctcaggctatccagcacccttctgtgggccgcagaggcctgctcaggacagcatcatgacaaatttttacttaataataacagtaaaagtaacagggctaggttggatttcttccaagacaaacagtaactcagcagaacacgctgctaaccttttccattcctcagtgccttccagaaaaggcagctctgacaaaacagggaatgcgtaccacaaacaagaggagagggtcattgtgtccgtggagaaaccacagtgagcctgcaagcctgtgaccacaacactccggaggttgagacggaagggtcacagaactgggggccagcctggtgtacacagtgagttcatagcctaatcattagatcttatctcagagaatccaggaagagagagaaggcaggggagatgagggaggagaggggaggggaggatgaaaagcaaaggacagttcttaacaggtgctggtgttaagaggctgcttgctggttggcctgagctacagaggagttcccaaggagccaaggtttgctcagcccccaggcctgagaggaatggcacgaatgtcagtaacctcctctctccactttggtgtgctcacatacaaaggcattcccattgagttggctaggcatgcaccctcttggttccattcacagtattctggtttgtgcaacaaaaacaacaaacaacaaaacagttctgttgtctgcaaacaggcactttaaaacctcatcatcctcgagcagaaagtattttctttcatgtggaaagtgtcctgggctctccctgtccaaccccccccaacacacacacacacacacacacacacacacacacacacacacacacacacacacactgtaatgggatgtttgttcactgtgaagatacattgctgtgactggtgtaataaaaagatgaacagccaatagctaggcaggagagataggcaggacttccaggcagagagagaactctgggaagaagaaggctgagttgccacacatggcaagcaagcaggatgggcacacaacaagaacagctttctgatcctacacttggttgatcacatgaatccttaaacagggcaataagtagagagggttccacagtgccagccagacacagtttaattgattacacgttgctgaattccatgcagagtcttgcggggggggggggcggaattaagacccaagccttacacatgagcagtttccttttctttcccatactgtgacacgtgcttactttccccacttaaatctgagctctgagtcactgagagaagctaagtgctgtgtttaccaacagcctctggaatctctccagcattccaccctcttagcctcccaagcacacctcacacaactatgcaaccctgacctgggtgtgagaacagacaaactgacacagctggtggggacatggcttggcttccgcacactgctgccgtgctcccagggagagctgctgggtgaaatggacctgagcactgagagggagatttaaacaatcgtctctcacctccccttaaagaccatcagaaaggaagtgggctgtttgatgaaaatataactattcgtttctttggtctgttttaatatttgtgagataaggtctcgctatttccttgggctcctgggagctgggatcctgagtgtttggatttcatgggactcgcgtcacatccgagggtcaagtcacttttaacaacataagactcttctgtaaggtctaaagcttgagtccttcggtggctaaagaaaacacccatggcatcaaagcgtttcaaagcacatttccagatcccaaccccttccaaacattcagcaggaagatgaaattagtccacaaacacattttccaaatttcctgtgtacacagccatgtaaatgacctttcgaaacttttcttgagccacatttgaaatgagagataggtggttgctgtactgtgcatcaaggcagtggaggagtgcagagagggacagagccgtggggacacagtggtgggatgcagtggagggacacagtggtgagatacagtgggatgcagtagatggacagagtgaagagacagagtggtgggatgcagtgtgcagtgtgtgatgcagtgagatgcagtgtgtgatacagtgaagggatgcggtgtgggatgcagtgtgagatgcattggagggatgcagtgagatgcagtggagggatgcagtggaggatgcagtgtgcgatacagtgaagggacgcagtgtgggacgcagtgtgggacgcagtgtgggacgcagtggagagatgcagtgtgggatgcagtgagatgcagtgagatgcagtgtgtgatgcagcgtgtgatgcagtgagtgatgcagtgtgggatgcagtgtgggatacagtgagatgcagtgtgtggtacagtgaaaggatgcagtgagatgcagtgtgtgatacagtgaagggatgcagtgtgggatgcagtgaagggatgcagtgtgagatgcagtgtgggatgcagtgagatacagtgtgggatgcagtgtgacacagtagaacgacacccgtgtgaggaaggggttaaatagcagcttccttagataaagccaaagatcaagatgaggagtcacaagatctcccgaaagtcacataccataaaacccttgagttcatggaaataaaagttcaccctcacttgacttcttagctttacacagctcaagctgctgttgaccttgcccagcaaggtttcagtgatttctcaccagcaattacagaaacattcaccaaagggatccaaatctcggtgagggcgataataaattgtggaaacaagcactctaactctacggtacagaaagtggcctccaaaagtgtcccataacaaacactgtggcctcatcactggggcgggcaagaaggtggcacacactgtggcctcatcactggggcaggcaagaaggtagcacacactgtggcctcatcactggggcaggcaaggcctggggatcagaagttcgaggccagcctggggtgcacaggaaaaccctgtctcaaaagcattaacaacaacgatatccagcacagtctgtgagaaagggcagaaaacaaacatattttacaggtgcccaccctccgtggttaaagtaacattcagaggctccaagatgcagaaccaccaccatccagggccacttacttcccctcagggtgagtgtgtctcatattcatgcctctctctcgcagaagcaagccagctctgcaaacgttgggaaagtgtggtttccaacttggagggggcagagggacagcagaaggaaagcccctgggagagcaaagagtctacaaagcaccccaggtaccataaagagacccctccctgacacttctgtcttcagatggctgaagacggaacttccctccttgccttacccaaatccttagggcatccgaagcacactttgaataaaatagtatgtcatttagaatttggtttaagaaaatcaaaaccatagggtaaagccagggatgggtgatacacacctgtaattccaaaaccctatgctaagacagaagagtgctgagttcaaaaccagcctgaggtacacactgaaaccctgtctccaaaagctggcgaggagttaggtgggttgataggcaaacagttatgtcagaggtattaggtgggtgcccaaatgaaggaaaactggccttgagagcacagggaacaggcacggtgtgtcaagggccacagtattctctggtgcttttcatacgtctaaacctttccacagtaaaaagatggagggttttctttttttaaactcaaaatggcactttacaaattgacctggtgagcatataacaatgcccacttgggagttaagctacaaaacaaagaggcccagcatttttcttccaacataaactttcatttgtccttccttccaaaataaaattaaatagtcaggcatggtgacacacacttgtaatcccaggactccaaaggctgaggcagggggattgtgagctgaaggccagtcaggaccacacagaatgcctttgtctcagaaaccaagccaacgacaacccctgcattagtttttttttatttcattgtaaaacacagttgggggtggggtgaggagaggtgggtaaagacgttggctgacaagccccatgaacaacctgagttcccacaggcaaacacggtaaaaggagacgatcctactcccaacaaactgtcatcggacctccacacgcgtgctgtggcatgtgcccccacgccatcccccacacacaaagggaatgaaatctaaacaatagtagggaaacaaactgtcagagggtgcatgtttaaaaggcaaaggacagtcaccagcacataaaatagtggatgtggttgattacccagctgtgtccggacaccggatcctcttcatttctccaaagatccatctctctattcatgcctgtgaggtgtggtgccggggaccctggcacacttgcttgagaactctagacctgactgctgtgctagtaactacagtgttgtcctggaatgtcccagctaatcccagctgcataccaggtgagagccccagaagcaccagaaagctgggaaggcaacaatgaacacacctacttaccgagcaagcaagcaagtgagcaagctgataaaagggaggagccctctgcagggatgacacttacagggtggacaaggatgatggagagggacaagaatctccctgtggtcacacagggactccaaacctacaggatctgaacccagagctgtatctaacccagtgttcttacaccatgagtttatagacaggggtctgaagctaagatatgtcacagtaacaagggcaagcaatcgcattccagaggaacccgaggcaccacctacagcctagtctggctcactcccagggaacagtgcgtgcattagtaatgcgagggcccctgggactgggcccctggtgtggcccaaaggctctgttaggagcacctgggagagaactgggtcccttcccaagtatagcatcctacctagatggtctccgtctactgtgccactctgttgtagagggggagaatccaagcatgccgttagaacttctgcagaactgacttcaaaatcacagccacaagagcaactagagagctgtagcagcccagcccaggtacaccaagaaagcaaaagaacttcactggaggcagacagacacatctatccagcctcaggagacacgtgctaaagggacagaactgggcggacgggctcttggtgagagggagtgcccctgactcctcagcagttttccacactccctttcccgttcccttcctgccctgggcctgagtgcatttgctcagcctccccccaccccccaccccaccccacccctgctccctgggcccagagctcgcagatgggaggattcatccatgttacttcccatccaaacatcaatcggtggccgagcaatttctgccaactctccctccgggtctgagtgcccaggtgagcttcatggacaggctgctttgctcactggctcctccagccccaccagagagcacaaatttaatggagtcatttgcgcacaaaagctaaacttaggagctgcctctctcctaaataaaattccttctattttctttctttttggtttctcgagacagggtttctctgtggctttggaggctgtcctggaactcgatttgcagaccaggctggcctcgaactcacagagatccacccacctctgcctcccgagtgctgggattaaaggtgtgcaacgctgccgccgccacctcccccccagctccctctctcatttataatatggggatacttacagagttctcgtcacaatcacacaatagtaaggcaggccaagggttccttgttcagattttggatttccagatttcctttttaaatatctgcatttatagaattaaatattttgggatggggcccaagcataaacacaaaattgccttgtgtttcaaacataccttctatacatagcctaaaactaaagtacaacatttaatagttttgtgcataagaggctggggaaacggccgtaggcgtgagcacgcattgggtacctgcagtcaaattttacgtatgaactcccgctgttcatataacacttgccctacagaaggtttgggctctagaaccattctcaatttcaggccaagggatgtgaagcttgcctatcagttcccagcactcggcaaacacggcaggcgtacacgaccagtgccactgttattatttcaatgagtactgcgggaaacacacgcactgctaagtacaaccaagttacaagtcaacagttacgttagtctatttatcagaaggaagccagacaagcaagtacagagcctgaggagtcgggtttgggacagggtgggtttcagacctgggatcactcaggtgagccatgaagagtcatcaagtgagttctgaaacgttataccacagtccctgccccagagggaagaggctgaatcaccggaagaaaaatacaaacagggatgaaccagaatcagctgtaagagggctgtgcagtgcccactgatgtaaccactgccagtcactaatgggataaacagaggtcctcaacagagatgctgtgcacacatgcacgtggtcactactgtcccctttcctcctcaccactgggataacctgtgatctcatgtgacaccattcatggcaacagcacagggaaagcaagactgctgccttctagggtggaaactacactgttgcaaagggtccccgagcatctcactcctgttaccacggatgaccacacaaggaagaagaagattgctcagcggcctggaccagcgcagagcaagcaagaagctgtgtgggccactggtctggccatctcggccattgctgggtgtgagcacacagaacaagagggcaaaggtcaactgcatgggttttgaagtagagctgtttaacactgaacactttgatacagaaaacttgtgagctgggcaggtccttcaataaggttcttgctgcactagcgggaggacctgagccaaatcccagcccacacataaggacaaccccgcacagataacacacccgccgtgtatctagacaatccttcatataactcttaggtgattgtgggttgtgtcaagctgatagttaaaaccaacctgcacgtactccttttcaaatctgagctgattaaaaccactagcgcttgagggattttcattctctgttctctacccctgcctccctggctctcttagagtaactgtttacatatggagtttatcaagtcaaagctgtgtgtctacaagcttcttagtacacattcctaaactgctccgaaattcaccaaacgtaaaagctacaactcaggtgaccccagtggacagttctttccttcgatgacttcattgtatcaaattttcttgtagaatagacatgtctgtctaccgctgttctcatactaaacctgatactgcccatgttcttctgggggaggagcggggggagcattcactagccctggactgcccgtgtgtgtgtgtgtgtgtgtgtgtgcgcgcgcgcgcgcacacacacacacacacacacagcactgtcagtgagtattcaccagccttggatacaatcaaagcagttgacctttgtacctagcaaagacacagatgtcagatgcgaggacctacacagcttctgcatacagtgggtatggcctgcactgtgatcctagcactggaatggcagaggccggaggatcccaagttcaagctcatcctcagctacagagtgaattccagactagtcctggctaagcgtcaccttgtctcaaaaaagaaggtgccatggttcccatttcttcagcatgaaggtgactgaagtaccatgttttcttgggcacttcaatgagaagaaaaggaagggaccaaacttggagttataacgaaccgagttcagagccgggcattggtggagcacgcctttaatcctttggataggctccaaagctacacagagaaaccctgtctcaaaaaaccaaaagttcaaattctcatctttttctctttgcaggctgaggctgaggtgtgactgcaccacacatcaggaaagtttccacgagggaaattctcaaccctaggaaggggcacctgcatctctgcatcctggctatggtggcaaacagtttccaaagtgcataaaggcttctataaacacaagtgtgacctctgagctgcataatgggtgtgaggagccatccagcccttcctttcctccagggagcatctgagaaagtaagacatagcctcctcactggtacccacgggaacatcaaatgaccgaactgcctctcgttagctttcagttcctcaaaatctatttgtgcacattgtgcaggaccctgggcttttccgaagaacagcaagcgcaatccttatctccctaacaggttgaatgaaatgctaggaagcagcaaaagtgaggcaggccaggttcactggttggcaaggaagggcttgtcccactcagaggcaatgacattcagagacataaagaggaggccaagatggaaaagacagtggctcacaaaggaaatgaagctccagtatggagaggtttgggtaagagaccatatccaaagctcatctaatttccccatgagtgtaacacttgacacagaaatgacggcaggcccaaacaacccagggcagcaaagaagacaggagcgcgtttgttatcccactattaccagcgatcctagacaccgctccatttagcccagcactgggccttactggatcacaagtctctagagcacaatgatcttgggttggaaagaggactccgagtcagcaacaggagcagggccagccgtgtggggggcgaggacgtcaccctgttacctgcatctccaagctcaaggacaagtgaactgatcagaagccacaacagtccttagtcttacattctaacttagaactgtgggatgaatgaaaaatgactcaaggtgacgccggctggacagcccattcctgtgatatcgtgatattatcaacgcctggtaaaacagacacattccagtctacaccctatatgctactgttcatggtcatctatttcctctaagtttctcattttaaacaggtacctgggagaccagtgatcggggagattgctcagccagtaaaatgactgccacagaattgaagggaccagctccccccacccctttggcacccaagcctgtcctggtcactaggaggtcagatgcctgccttgtggcaaggaaccaatcagaagttagctggtggtgctatgctttacagcactgggtgtgctttatggacaatcgcacagcaatgatgcgtagagcatagcaaccgccctgggagggcctatgggccataacaaccagttgaccaatcaacacagggcaggtcctccaagccaggaggcacaccaatcctgagcctgtgcgtacccctagacactcctcctacactgccctataagatccctatcttgtggtttctcggggtctttctcccaccatccactgtggtggatgaatgaaaggcccaagctaatggggttagctcgttaaacaattgcaataaaagactctttgcttttgcatcaaaataggcctcttggtgatttgagggttcagaatttgggcacaacaggatcacagagttggctttgattgggggtggggacaaacaagagacaggagggtccctggagctcattagttagtcaagctttatcaggcagccgaaagtcctagtgggagacacatctgaaaaagcaaggtcgacctctgtccttcaggcacagggggcagcaccacatgccctcacacactcacaaataaataaagggcaaacctggaagacaacccctgctaacactgtccatacgtgagcagtctcacctgaacgccacatattctaaaggaaacacctgactccctggttcactgcctctttttaggctctgcttctactctcttcagtatctcctgggttgtgtactactacgagaccaatcacattcataacctaactctcagaggtgggattcttaagtcagcagaacgcacagctgacaagtgggacacccagcgagggctggaagtgcctgactctgttacttttagtcagtagctagttagaaccctggagctggaagatggctaggctttaagtgacaaaaatgaagacgttcccaccctttttcccccactgaaaattcaaatcagagggaagaaatgggacacaagcgttataaatttcagaagggcccacaggactggaagcgtggctttcagagaaactcggcagcaggtattgtttggtttggggagggaagtgagtaggtggtgggcagggaaggactctgagaatagaagaattgtttggataactttatggggaagtgttacccctcccagcacagatgggaacaggaagccacagggctccaaaggggcagtgctcagggccaacaaaggtgagggcagtcacaggagaggaattcacagcacagtggaaggcgggtgggaacttagctgttggagaaaaacaagcaagtgaaaaggtgagagaagaagaaaccggtccaaaaatgaaaccgctgcctgggcaccgcatggtttagcagtcatcggggctccatgcgcgcacaaggaacagaaagcagaagactggatggtgggagggagtagaaaaaacgcacccacacacacacacacacacctccattaaggagtgctgaccttggctatgctttcattctgagcatcccagagcatctccctcgctcctgggagacaggaggcagtctccccacagactcagcagccaggcaattcctcaagctagctcctcttgctacgctgagcacccgtggatctatgaagacgtcttactcaagctgagtacatcggcaggcaacccgcagccgccagacctcatggaaaaagggggttccactctttgtggagttactgaaaatggaccaagaaagatgagcctgtggacactgagctgggagaagtagacctggagagaaacccagaacacagctgacttgggcctaccattccccaccttcatcacagggtaacaaagacggagatgatacagcgggggctggtgaagctgcaagcatgcagggcgccacaaagggggctgaccgccaggttgaagacacacgcttccatactttaagtggagagtcccaggctacaaacatccataggtgctggtgccattgtggtcagtacagtggtggacagcgggaagttgtaatcagtaaatgcctgggccacaccctaatttttccagaggttccagctgctgcttcctgcagcccctccccaacggtagaatctgcacgcgttacactaatccatcagccttgctttgccatcatcttcacttctcagacgatctgagccccttcctgatttaacatcctagctggtgacaccgacccagctccagctgtctgcaggaacccgtggcagaggtgacatactcgccgagtacatgtcaacacaaagtcagcatgaaaattgaaccctccaatgacgatacagtgcaactgagggctcgagacccacagtcagtgtctatgcaatgagtcgccacattagagagaaggaccctttagaggtcccgagatgggaacaacgggatccaagttgctacacagctttgggcccagggaggatggaggaaaagagctgagagggagtagaggccacaaataatccacatcctcacataacgtgtgtgcctggcatttccccgggcacgagcccatggcattcactggcattcttcctcttctcctcgagaaaccaaaacctccagggaccctccctccccaccccccagcagtgagcacatgtcaatcttgagactccgtggtgaaaaataaaccaaaacacgttcgtgttccaggagcttacgccctggaatgccaagcttgaaacctggcacttcaccatctgtgtgaaatgctgacccagggtcagctggggccaccgtgctctacgggcaaggcaaggaagcagcagagggctgactgctgacagcagcagcagcccaaacacacacacacacacacgcacacgcacacgcacacgcacaccacacacatgcatgcccaagcacacacacacacacacacacgcacacgcacgcgcacgcgcacgcgcacgcgcacgcgcacgcgcacgcgcacgcgcacgcgcacgcacgcacgcacgcgcacaccacacacatgcatgcccaagcacacacacgtatgcagacgcacacatgcatgcaagcacatgaacacacacatatcacacctcctcacgggaagaagcctgaaggcttcccaatgagattaatcactagagaaggaaaagtgccttcaggtcctcccagggtcttgtggaaagaagctcccggcactaggggcttctggactggaagctctctccagccagcctccagaactcagtctgcaactgcagacagacagacaggtcccacctctacctcgaagaatctgcacatttgctgcaaacaagaattcattccacagctgcctccagcctccaaggcctgctacactgttggtgacctgcaggcttgctctgcaagggactgcacttggctggcagcccaaagccctccaagagcttatgaaccttcatgttcacagagagctgtaacactgctcagaaccaagttgggctaacattgtgctgctgctgagtccaagcccgtccacttaaagcctgcatttgttttaagttgctttacactgtttaaggttattaatccaaattggcaaccaagtatctctcaattgtatcctttgtcatgtgcccactccatttttagagtagagggcacaagaaccacttggacacaggaaaccatctgcaatcgccacctcactgtctatcaacaaaataaaagtactttcatagcttcatggactggagcacaagcggcctcagattcgctgtgtctgctcatgagtcaactacagtattgcaacaaaatccaataattgtgtctgctttccgagctacaccataacgtcagtcactgatttgtgagactttcacacacagctacacaaaggagaggagggaagatggggagagtatagagaaaaggaggaccacatcacgggtctcgaaagcttccagactggaactggaggagatgaatcaaagacggaagagaaccacagggaaccctaaagtgagacaagaatctgaaagcaccttgtggagagaaggtgctgtggcttatatgctagcagactggctgggtggagaccgtcttctgaggtacctgggaggaggcagacgctgacaggacagatgactaggccaatggcagcatgaatggcctcccctcacagagaatgagggggaggtcttgggggatggctttcctacagatgctacagcctgcccccagcatcacaggaatgtggacagcacagacactgtacaggactgggaagctgcacccactcagcctgcaacactcgcccttcaaacatgaccacgtgaaccacagttggagagcacacaagacttctgtgtgtccatatgcacgcatgtatctcacagctcgtaaaacagcccttttctttccttgagatggattcccgtatcagccaggctggcctcagtctccctaagcagcggggggtggcctggtcctcccgcctccaccctcttaaatgcaaggatggcaagcaagcagtgccatgtgcagcttcacgcagtgctgagcacggaagcaggaatccacgcatgccgggcaagcgctctaacaactgcgcacatccacagaccctcctttctttaaaacttaagctcacttatttattgaagcttacacggtgataccaaaaataaatgtgaactggttaaagtggaaaatcaacaaaaccttgcacactgagtcgtcaacgggcagccgtgtgtgcaacgtgtataagtctttacggtagaatggaggggtggttcaccacttaagaacaaaacccacctcgctttgctcctcacggcacagaaagcgaaagcgtccgggtgccgaagtcattgcagagtccaaccgacagagctgactgacagcttccttggtgagacgtgcactcaacagtgtgcggaaaacaagaggcaaaagagaaaaaggtgtccccgcacctgatctcaaacctagcagtgacagaaacatcaccacatccatccattaaacattatgaggacaataagctcaagtgcacagaggagcatctcagacttggagcttctccgctcagacctgagttaggccagaagagggtgtcagacgcttaggacagcattttccgagggtcatgagggtgctagtcactgaacccgagtcctgcaagagcagagacttgtgagccatctctccagcccctgtgcctttatctctctctcttccagagtccccataaacagtgtcaagctgtgtctgctaagaagagctttgcttttctccagtttcctccagagggaaagatccctttacatagatcccttgacagtggtctctagccacacagctgtgttcacgtttactaaccagtcatggagatgatcccagagacagccgcactattcagggatgccacctggtttctttgcgaggcatgagtcataaaacatcccagctatgtaaattctctctgcaaaaaaaagaaccttcacagagtaggccatgcaaggtcaaacagtcttagtcagaggaacggctagccattatttcactctgagcagtagtctcaaggaagattaggggtgtatatgggggtgggggtggggtgtgtgtgtgtgtgtctgtgtctgtgtggggtgtgtgtgtgtgtgtgtgtgtgtgtgtgtgtgtgtgtgtgagagagagagagagagagagagagagagagagagagagagactgcggcggttaaccactaatcacctgcctaacaatgccccacacagtcctcccaaccctccatgttacacggcgggaaggcaagaatgtgtcctgaataaggctgcagataagaacaccacctcggggctctaccagccaggggcagcagggtagccagacctaaatgtaaaggagttttcattcatcttgtgtagtgatccatcatttatgatttattaaagcttgactgaggattcagaaaacaaagtcagcctcaagctgtagaaaccaggcagtggtgatacacacctttaatcccagcagccagaatctaggaggtggtagtatacttctttaatcctaggactcaggattaagaggtagacagacctcagtgagtccaaggtcacccagatctacacaagattgaatcatctaaaagagaattatagctcacacctttaatcccagtacaggagcaagtagtcagtaggaggtattcattctccagtcacactgaggagaggttacagtctgaggcctggtgagagcttgtggagacaggagcagcccatgaggttaaagataagaagctagtgaccggctgctttgcttttctcatattcggcttgaagtttgaaccccaatatcagtatctgggtcatttatttttcctgttacaatcttgattcagtagaatttcagtctagattattaaatcctagaaagaaaaactctgtgtacattacctttgaactttgagatccatttgcaggtctaaatgtgctctcctccagcagtggaggtattgtttgtttgcttgtttgctggggaccagatccagggcctggcacaagtctggaaaaccctgcacctctgactatgccctcaggtcctcaagcaatatttgagaattttaggcatcttattgctttttacaagatttcatcaatgtatgttcacataataccaactgaggaaacagtaataaaacataaaaaaaaaaaaacttccgaagtatttttcttgcctttcccatatagcctcggttcactaaagtcagctcctactgatggctcctcacctctagcagaaccattcctcctctctcctgtcctcagaggctcacctcagagtgctctatcagaggctgtgggaaggcatcctaggacacccagcagcccctctgtcaggttggataaacagctagaggccttctgtactgggtgaatctatgccatggccagcatgctctgggaatacaaggtatttctccaagcacagagaccagagacccaggttcccagctctgggttccccttgggtaagtaatccttgagttgaggcttgctgggttagctcttctagctctgaggaaaagatatcacttggagggattcccttcctgcacataggcaagggtctgagagctattaaagtatcagagtggagacaggcagatccctgggcttagcagacagccagccttgcctaacccacaagcctcaggtactggcaaatgagcttgcctcaaaaacaaggtggacagcacctgaggtcatcctctggtctccatgttattgttcagtacgcatagcatgtgaacatacacaaggcagagacggtacatttacaaacctgtgcgtgcgtgcgtgcgtgcgtgcgtgcgtgcgtgcgtgcgtgtgtgcgtgtgtgtgtgtgtgtgtgtgtgtgtgtccacgtcagcatgcacactgtgtggcggtgcctaccgaggacaacagaatgtgtggggtcatctggagctgaagtgacaagtggctgtgacctgcatggtgtggaccctctgcaaaagcagcaaatgctcttaaccactgagccatctctcccgcccccccaaagacggtaaactttatgtgatgtgttttcttaacttcaactcttaaatcttccacaagaagacaagaaaaacaacaaaaatacccccaccagaggctttgtcaacaccaaaacaaactacagcaatataagctttgaagtatgtctgaccttggtacttcactgaaccatgggcttgtctggaataggaagcagaagagaccaagaggcagttgagagaagctgatttaaactgacgcccagctgggccgtggtggcgcatgcctttaatcccagcactagggaggcagaggcaagcggatctctgtgagttcgaggccagcctggtttacagagcaagtttaaggataggctctaaagctacatagagaaaccctgtctcaatatatattcatattcatattctcagagcagctgggagcacagcctagaacacagcctggagcacaagaaggactgcatgattctgttcaccacacacttagtgacacctctgacccagatgccatgccaacagctgcaaaaccaacagaataaaagccccactaaaactcttcttactcacttggcccatttccacctaaaaatcaagagggatagctcagcagttaagaactcttgctgctctgggagaggacttgggttcaattcccagcacctacctggaggcgcacaactggtccagggggtctgatgccctctctggcttccatgggcaccaggcacagacactgttaacggacatacatgtagacagacgcttgtataaacagtcttacacaaatatttgaaggtcatcccactacttaaaaggaatatttcaccaaaaaaataccaattcctatgagttcttgaaaaagtaaatctaacagcatttagacgactttcagctttgccacagttggctgggacctaagtcaagtcagggagtgcaggggggagggagtagggggtccggtggagtggggggatgggatggcagagtcgacagattctctcctttgccatcttctgggggggtgttgggggatacagacatctaagtggtctacctgaaccctctgcccgtgccacctggacttgtgcatcagaaccccgtatctgccgcagctgccttgagcttagtgaccgacagacactctgccttactgtccccattggtaagctggcagggctccttacacactggttggttttgctgtcctttattccactcattatctccatcggccagctttggaagactcctccttgagccacaccccacccccatcactccttgtttgtccttctttctttggcccaggatgattctggaagggacctgggggccctgactcgtctttggccatctgagtgctcccaggctggaaattccagagcataaagatggtcaatctccagccccagggggcaggactagcctgaggttgtctgatccagataaagcatccccttttaaaggcaataagctggagggctgactgcccccaagctccctgcagaatgtgttggtggtcataattttaaggtatgatgtaaaggaaccctgtaggtcatgggaactaccccaggccattcacctgctgatagatcatttgcagaaaactttcaaactaccaaatggacttagagttgtcatctttggtgtagcccttaaaatgtggtgggcgcttggcttaatgtagatttgaaggctggatacattaatggagtctgattccctcaaaagaacttgagatttaattttagtgggaagactagtgattttgagatagcctcctgtggtgtgggctggcctggaattcttgtctccatctcccaggtgtgaggcactattcccagttttcagaatgttggggataacacagcctcacgagagctggccaagcaccctaccaatagagctgcaccttaccctgtagagcttgactataatgccttctggaggcaggggtggggtctgactcacggtccccaaataaacctgaaaatcagacctatgtgtatgtaccaagtcttccatcagcaggtcaagccttcacccataattcacttgtctaaggccacataactgaagaccgtatatgtttccccctgactcaaaacacaagtgacaagaacatggaatgagacacagcagctgggagccctgagcctggcctggcgcaactcaggtacctgagtggtgagcacagatggtatgctaagccacccagtccccaaagtctgccctgtccccagcctatcccgtcagcaagtcacccacctgctccctcatctatagcagtgaatgaagaggggacaacttctttccaatctaatgtcccaggctggtgtccctcaaggaccctctggccactcaagcacctcctgtgggaacaagcctgctctcggggtgagacgacagtggagaacatccaaaccagttaatgaggtttgaaactgtgttcggttcatcattaatctcataaaaaaggcttctcctcctcctcttgtgaggcacgctggcatctcgctacggctgggaattatgtttgccaaaacacaacctttcctggctaagctgggaaggatctgaaacctggggcctcaaccaagagctctacacagtgtcttaggaggttctcctcagccctttccaaagcacagtggcacaccagccacccaccacacacccaggttctcatgggaagctgtgcacagcggcaaggcccatcacacagcgtaaatcactcgctccctgacttctttaccctccttttacaaactgaaggccatgctggaaagggcttgctgtaccaggcctttggcttttgactctaaggcctaaaaacaaatggaaaagcacccaatccctttagacagtcctttgcaaggaagcccaatagccagcaaaaatatactgttttccccagttggaacacaggtgagagactggttccagtgagtgtgtagcaggctgatgacagctgccagacactacattcctgtgacagatggttggttaagatactggccttcctgctgaaatcattcttgcctgattagcagtggagcaaaacaaacacagtgtggtttgctaaactgcgtgtgaaggtgcctactcctgaacgctaacccaagcaacacaccttacaccagggctgtaaatatttaccttccttgggaacacattcaagggaaatagtacagctactaatgtttgaaaacactggattaactctgatacgaggaaggaggaaaaggaagaaaaaaaacaaagaaaaaacttgggaaggcaggaagcactggaggcctcctccaggaaaaccctcgtatttccatggtcccaccccagacttctgttgccctcatatcccgtcccttccacccactgaagcaccagccacatgagtttccccttatcttcccgaacatgccctctgcctgtgttcctggctcccgctccctctccgtcctggagacttctttctcaagttctttccagacagtcatccttttggcatgaggacctgagttcaattcctagcacccaccagggcatggcagcaagcatctgcaatgccagccctgggcaggagcaggcaaagaaagataagcagcagtctccagggtcagtgagagacctgatctcaaaaaataaagctgggaacaaagagttctgggtgctgtctcccccttcccccctcctctcttcctcccctcccccttctcttccttctccttccctccccctctccctccccctttcctccccctgccttctccctctccctgctcctctcactctctgtatctttatagctacaaactctcagaaaggctcttcccaagaaggaaattacagggctggaatgcacctcatggcagaacacttgcctggcatgcatgacgacctgaatgccatccccagcaccaaacggtggaaatcattgtctgggggtttgagtggggtgcagggcagcagacacagagtcaggaaagagaacagcagggcaggtctgctgtttaagcttctgaagactcggcccaggctggccctgaactcagcagtcctcccacctgggttccaagtgctgggattatgggcctgcactaccccagccacctcttttattttaaaacatctttttttttttttaagtgaagctcctcctttcagctggactgaaactagaaaggtgaaagggggaacggatgaataaaagcattccgtcacacagcagaaagaacagaatgacagcctgaggaaaccggcccaaagtctgtcttgagcctcttccacattggttggtaaggtaagggcctttaagtttaaaaaaagaaaacaaaacagaaattacccccgaaggcccgaatctataaatgcctcatctgcgcatccatttcccagagttcccccaaggacctgactgggcagccacagccctccctctccacctgggccttcttcacgcccacagtcccactccatgcctgcagcgtgctgtgtcgtccaggacacctgctaacttgctgaaagtctcctgcatttacacagatacattccagagagtttggaagaagaaacgcacacgccagggcaatctcacttctcatgcccagacatgctcatctgtataatcacagtgctcttccttctgctcattgcgcctagtgctctgctgggtcccagaggccacggcttctgtgaactctcccagactaatatcaaatgggagattcttcagatctacccagaggatgaatgtccccccaaggggccttcgctctcctgctccaggaaatctttcattcaagataccaaacaaggggctgtagagacggctcagcacaggtaaggcacccgctgtgtaagcaggaaggcctgggtctggacatctgtgaccccgggggaactacagcagaggtggggatggcgggggtgggcgggatgggggtggggggtgcagagcagaaccaggaagatctagggctcacaggcccgcctggttgaaaccatctagatttagaggggcaccatgcttcaataaatcaataaatcaataaatcaataaataggtgaatgagtggaacattacagaagacacctgacataaacatttcagaaacacacacacaccccaacacaaacacacacatacacacatacactgacaaacacagagacacagacacacacatatatacagacatacatacacagacacacacacacatatggaggcaaacacacacagagatacacactcagagatacacacacacacatacacacacacacacacacacacacacacacacacacacacacacacacacacacgcagaaagcaaagtacttggcgggaggaagggaactcattaactggggacatgagtgtgaacagctatgctgctatctagatatgaagtgtcacaaaaaaaactcaatcgttttatagactaactttaaaaaaatacagatttcagtggtagtcgagaaaatgtagcgggtctcagcctgtgggtcgaaatccctttgggagtcgcatatcagaaatcctgcatttcagatatttatattgtaattcataaagtagcaaaattatagttatgaagcattgatgaaataatttcatggttggggatcaccataacactagggactgcagtaaccagcctcagcattaggaaggttcagaaccagtgtgcaagaaagagttctctacctcaggctggaacacaatgcactcaacggcattcttcaagtccacccaagcccctctgctgccaccctgcatcccacaacaggctgctggcaggggccatacagtctgtggctctccaggtgtccacgttactgtggagtatggctcacgtggctccctccaagcagccgcagatggagcctgacagagaagcaccaggtccaggtccctggaatgcgacagcatccaccctctgcttgcaggttatacagaagtggcattcaagacattcccagcacagagtacatgagttcatatgagaaaaacaaaacaattggatgcatttttaaaggtttgtttttattttatgtatatgggtgtttttcctctgtctctgtgtgtgtgtgtgtgtgtgtgtgtgtgtgtgtgtgtgtgtgtgtgtgtgtgtgcgtactgtgtttatgcagcaccatggagttcagaagagggcattcaatcacctggaactggaactggagttacagatggttgtgaaccaccatgagggtgctgggaactgaacccggatcctctgtgagatcagtcagcgccctcaactgctgagccaactctccagccctatgaattttttttttttttaatgtactgaaaagccataaatcaggggaagacctgtcacccacaggtgtgtgagtggcctgaataaaaggagctcctataatgcatacacacgtgggagctgcacgtggtgtgtggcagtccctgcgttagtaggcagaaaggtcttctccagctaccctaccccagctaaggagctcccagaaacaagcacacagcccatggcagctcccagagcggaaacatgtgcaaatgttgaaccagcaatacaagcaaacaggagtaagaaagaacaaggcatttcttaagaaagcttctcaccggggccaatgagtgggctcagcagataaagacgcttgccaccaagtctcaggacctgagttcacttcctaagacccaagttgtcctttgagctctgtgcaaaccggcccgcacatccccctgcaggtgggtcagcagtgtggagaatcagttgcttcaggtgcccgttactctcggaatccacccaaagtcatgatgggagacactgatgggggaggtccttctgtgtatgtgtttcccttattggcgatgaataaaacactgtttgacccatggaggcaggaagataggcgtgactgggagatgagagaaattctgggatagataggcagagagagaccgctggggacaccatgtaactgacaaaggagtaacaggccgggcattctccggtaagccaagacaatgtgaaaatacataaattaatagaaatgggttaataattaagacagagctagccaataagaagccctagtcatcggccatcagtttaataattaatataagtctttgtgtgattatttaggggctatgggaccaggagggacaaaaaaactccagcaacaagacatcatttctgtttccatttaatctgcaagaaaacacaaactaggaacttcttagatcatttcctcacaagaataaaatattttctgtgattcatctggcatcctaaggatttaaaaagtagttccagtactctggaaacctgtaaccaaggagggctggtttccccaccaatctgcacagctctgaccggctcagcctggatttcaggtgtttgggttaggggtgctttgttgacagtcagcctaagcgcatatttccaaatccagaatctgaaacaggtctcatcagcagtaagagatatttatattgcagtcttctcttcaaaaaataaactggagagtggccaatttaatacattgctcattcaagtaactacctgtgttctgaaaattaacacgaagaatacaagtatccagcctaggaggtcataactaaggaatacatactcaaggagtccattatgtcaggctctgaagtaaatgctctcctaattatgtttagcttaaatcagaaaaaaaaaaaattcacattccttgagtctgagccaattggtgggcagctaaggaggttgcttaggagcacagttggctgactctgggctattttctattttaaacactggacaaggaaagtaaaaatgacgatgggagagggagaagcacaaagcaaaacggtgaaagttttactgtgaacaaaagcagccaactgtaaagacaaataccaaggagtttctaacttaggacttgacctgcaatctcatcccttgcttggtagatcctacaactaaaaacatagaaatgacatttacaaatgctggtgagctgaaactaggcagggaaaggagggccagagaagatgaaaaagctaaggagatctgcaaaacgcatccctggccaagagctgatttcagactgagttaggcacctaaaggacaagactgtatctgggtgactgtgacacacacgtctgtcatctgctcattcctgccactgggacaacaccctgacaaaacacaactcaggggaagagaggcttagttagctttcgattctatgatccatcctggtggaacctgaagcattcacaaccacagtcaagggcaggagagaatccatgcatgcatgcctaaagcattcaaacccacagtcaagggcaggagagaatccatgcatgcatgtgtgaagcattcacaaccacagtcaagggcaggagagaatccatgcatgcatgcctgaagcattcacaaccacagtcaagggcaggagagaatccatgcatgcatgcctgaagcattcaaatccacagtcaagggcagaagagaattcgtgcatgcaggcctgaagcattcaaacccgcagtcaagggcaggagagaatccatgcatgcaggcctgaagcattcacacccacagtcaagtgcaggagagaatgcatgcatgcaggcttaagcattcacacccacagtcaagggcaggagagaatccatgcatgcatgcatgcctaaagcattcacacccatagtcaagggcaggagagaatccatgcacgcatgcctgaagcattcacacctacagacaagggcaggagagaatccgtgcacacatgtctgtcactcagctcagttcctgcacttacacaaaatggcaccaaagcctagggaatgatgacacccagattaactagcataataaatcaagacgatgtccccaccccttcccagacacacccacaggccaacctgacctagacaattcctcatgaagaatctattccaggtgattctatattgtttcaagttgacaagtagaagtcaccataggcagggtccttagacctggcatctggaggcctcgtttcactcatcttctcctcttctgtgcatcccgtgtgttccgtctgtgccgctactttcatcttctgaagacccctgtgagtgtgcctcagcctctacaccctccctttgcttcctgacctctcagtcttggctcgacaggctcttgaatgtaactgacatagtcttcagatcaccatgcagccttcctaaccccgaacaaaagcagaggagctcctcggcctgtctctaaggatgtgatgacggacggaatggagccactgaagccaatttcactggaataatttttttaatttagatttttacattagggatgttcaacttgtagtctgagcaggtactccacaaccaggagccttcaagctggagaccctctgtcccagcatccgctaaggcgagcatccgctaaggcgagcatccgctaaggcgagcatccgctaaggcgagcatccgtaaggggcacatcatctaccactctgtcccggcatccgtaaggggcacgtcatctacccttctgtcccagcatccgcaaggggcacatcatctacccttctgtcccagcatccgctaaggcgagcatccgcaaggggcacgtcatctacccttctgccacaaggggcacgtcatctacccttctgtcccagcatccgctaaggcgagcatccgaaaggggcacattatctacccttctgtcccggcatccgcaaggggcacatcatctgtgtcctggggccaaaacacagacaacacacttctgtctggcagtcacccccatttcagcaggagcttcctctgggaaactgctcacttccctcccaagcttctcccttctttgctctatctgctgtcaatcaccctctcttcacactggaaactcccagttcagaactacacaaactacacacacacacactacacacacacacacacacacacacacacacacacacacacacacacgcacgtacacacgcacacaaagtcagttctgctaatcagcacaagggcttggtctgccccgaaagtaagggttcttgcctcctcctctgcagattctgggagcctcccatgaaggtttataggtttgtctagacaccactgtttctaagctgaagccaaagacaagcacagtgacaggcaagggagaggacacagttggtaataaaatgagttcgtttacagtttggacaaacactttaagaaggccactcttggtttcaatgtagtatttttggccgtgtgcaaaccacaaaacaacagacaaatccataagccctggagtcaaatactaggccagagagcagccaaccttctttcttaagaaggcactatgcaacaagccctgaacgtagaatgtgtgtgtgccctttacccagttgcgtgagattacaaaaccttttctcagctctgcttctccagtgctccatttcattataagaataaagactcagggctggagagatggctcagaggttaaaagcagtggctgctcttccagaggtcctgagttcaattcccagcaaccacatggtggcttacaaccatctgtaatgagatctggtgccctcttttggcgtgtaggcatacatggaggcagaattctgtatacataataaataaaattaaaaaaaaaagaataaagactcagctgggcagtggtagtgcacacctttaatcacagcacttaggaagcagaggcaggtggatttcttgagtttgaacccaggctagtctacaaagtgagttctaggacagccaggactacatagagcgaccttgtcttgaaaaaacaaaaaccaaaacagacaaacaaaaactagaccaaagccaggtgttgtgctgagctcttgtaatcccagcatccagaggtggagactggaggctcaggagttccaggtcatctttgggtacaaagaatgtttctgtcagcctgagtatatgaggcactatctcaaaagccccccaaaaataaaaaaatagttactgagaaaaatatgcaaagccaaggagacaaagcaaaagcatgaaaagtttttattcatacttccaggaaccaggaaacaaaatcaatagcctttatgtcattcaacttaacaaaaaacacatcaacttttctagatcttttggttttaaaatctcacaagcaattagtaattgcaaaatccagagcaaggagggaactgggaagcctgcacactcaaatattaataatggcaccttaagctgacagtgccccagggagctgtctgtccatgtaacaggatccacaaggcttgtcctctgacccggagtctgctttggaagccataccctaggggaatacactccaagtaaagtaaatgtcatttggtccacgatgtgtacaggctaccttatttacaactgttgaacctggacaaactccaaacactggactcaaaatggagttgccaatgcccacgtttgctcccgtcctgcctcatcctactctccccgtggcttgcctggaaaaactgaaggtagagcatgaggcctccagccaatcatttggggctctagcatgtgacatactctgcctgatggatgccatgtgaacgggtagtacacttgcagctctacatgactcatgtgattcacggcagggatccagctccgagtcagagtgcttctcctagcacgcaggaagccctgggtacaagccccagcgctgcataaactaggcgtgcagtcccagaacaccaaaggtggaagcaggaagatcagaagttcaaagtcatatgttacatagcaaggagagggccagcccgggctagtcaagatcccgtctcagaacatgaacaaatggagacatgatttacaccacactcctggggggcggggctcacagcccaggcaggtgccatcttacatgattccttctataacttctctactgagctgagcacaagtcctgggttgcaaccctcctatggcactcatggggcacagagaaggaatgaatgccagtcactaagatgctggaacccattttgttaccaggacaaaaaaaaaagccagtgttgatgacagtatcttatcattgaaacatgtcgagctatagaatagctggtacttttttttatatgaaaagaaattgcagaaagacaaaaattcagaaaatatccgtgatatctacatatggcaagccagcaagcaccaggaattgagtatgatgtaatgtctttcaggtttccttccatcgagaaaatgtatgtaatacacatctataatatatatatacacacatatcagatatgtgtgtatatatatacacataaacatagagtgaaacctttgtttgtttacaagagacaggcaaagtaacaagctctcaggccaccgtttcatgacaagtggtgaggctgtggcagccttgagagacgggtctcaaagccttttccctcacattccaagcaggtgtccgtggcctcggaactcagcagcaaacactaaagaaaaaacgtcacccaggtcccctgcagcataaaagctgccggcatttgcacctgcccttctttcagaggacccatgtggggtacagtagcgcagacgagcgagcgagcgagctacctctatcttcctaacagacattctcctgagcacaccagcttctttatcccgggcgcattgccatggtgcccttgtgaatctccaaacccccaatgagcttagcaggagccagtacagactgcctggcaagagaacagggtggaccactgtgcccaccggcttcctaggcctggtagactcttagctggcgttgcgtcatggctgcagctggctggtgtctttccgttggccacaccccaggagataaatgcacacagcgtatttattctggggaggaagctgcccacccttaggtcaagtttggtcctttttccatgttctgctgctctactgcagtgcttatcagctgatggcttttttcatctaatcactgggaactgtggcacacctggctcccagtccaaatactttgcacattaatagaccaccaattcaacaactcagtgggggcttccaggtgccaccctgcctggtctttacctacaggtgcccctggccacccggttccagaagaggctgctgtggtttctactcatatgaattccttacccaacagtggccagcattaaagccactaagtctccgtcctagccccaatgcctctgctgacgggtgctctttctccactcgggtcaacagttttatcttgcctggaggcctgggcatcatgcattacactcgcatttacttatttttcatctttaccatctgtctgatgcttcccatggggtgcaaggttctgggtcccaggaagggctcttttacaaagacctaaaatgtgttctgagtgtcttcaggccagccccgatgggaagaagtggcaagccaactcctctggctcatctgcctgctctctacttcccttctctaactgcaaactgttggtggccaccagtcgccatgtccagaatgtccctttattgttgttaacacctccctgaaacaagcaggttgcctctgggcggctgtctctcagcctcagttccacatctcattacacattagcagcagccaggcagcctccatggcagcttgccgacactctcatccttatgttctactctcagggaccataatatttgttctaaaccatcaaccactcttaggtgtctccacctaatacagtgaaccccattcattaagcaggaatgccactccataccagaaaaaaaaaaagttcaccctgggatctcccatccacttccaagctgctctgcctcccagtggttcggcctcagctacatctctaactacccacccatagtaggaccgaagcaagtaccgccatggccagggggcacaacacacagggaaggatggacacactgggatttcaccccagtcagttgtcagtttcatccttgactttgtcataatcctgccgactgtgccaaggactccgttccctggggagacacaaacaaacgtctgcttctcccttaaaaaggcaccagtgagaaaccggaacacagctccactaatattcaacctggagagcctgggtttacttacagagcaaagtaagcccacagcaacttcaccctgggaagtcttgccacggggtgggtaacggcttctccatggcggcacacatgttggtcctcctccctgagtttaagctcccagggagttgtatattctaacacttccgcatgcagttacaggagagccacaaacagcaggctgggaggtgcaggagggagcagctggaatcccagctgagggtccagtgacccccttcctacctctgctggaggggacatcaacaagcaaacttcaggggtcacttgcaagtagcgacggctaatctgatgatgacatgttggttccttactgtactgtcttcctttaatccatgatggaattttctaacgctggcaagaactagtgtccctggaagtcactcagcgaataaatggactgcggtgggtggctctagctaacgttttctctttggtccttgagagtcattaggcacaactgtttcacacacacacacacacacacacacacacacacacacacacacacacacacacacacacacccgccgtcccttagtcattctaaacatgggctgtcattcacagcgcccattagtactttagccgatagctcttagcctacaaagactttgttacactacttggtgcacaccatattgtttccaaaatcttaacttttaccgtgttaagaattattctacctactgtgatattagtcccggtaacaggaaactcagaaacatcagccatctcagtgtctaaaaattcaagctctggatttgtgcccagatcctccactcagctcttcctccagtctcggcactgcaccgagtggtgttagacataaccagtgtttgtacagtgtttgcagggtctgccacaagccacttagcctctctaagctgctctataacagcccagtgacatccttagttcacagggcaatgtcaagatcaaggaaacaagccacttagagtgctagacagagtccttgcatgtgctaagtgtcacatcaaggtagctctgcagggtgtctcaagtgccaccagacctgcctcttatcgtcacctacacctactttccatttgggcctctgtcccccctcaccctctgaagctcagctgcaggacagggctaggaatgtgacctccatgaggaacactctcacaaagaggtcacggagagtaaacataccccaaggatccccatctccccatgtccaagagaatgctaacccttgcttgaactgtccccactgaccctgtcaggcaagtacacccttcataaacctcatacaccatcatcctcctttctgactctaggagaccactaacacaaacaaacggaagccaggaggtgctgggaaggccctgcagcttctccatcccagagcaaggagcacaggtgctgaagtcatcactcagcacaggctgcttcttagccaggtgcactctgcagggtgggaggggccggacaaaggagcaccacagcgatgcctgttccatttctgtaagacccttgcaggttaataggtacgatgcaattcttggttgccaacttgactgcatctggaactaatgaaaacccaagcagctgggtacacctgtgagggagtttttatcagtttttaaaacgtctgaaatgggaagactcacttttaatccagttcttctgagctgggaagatctacctttaatctggaccatctcttctgttggaagtttatgtaaaagacatggagagggtctgcctgttgctctcactcttgcagccaccatctttgggatgctagcatatactgacaaccagctgagacatctaaccttgtgaattgaactactggattcttgaacctcccattggtagacagccactgtttactagcttgatcaagcctaataaatcatacacacacacacacacacacacacacacacacacacacacacaaattaaattcattccagaaagatggtcaacattagaaaaacatctatttccaagtagtttatcacacgttccaataaaaaggagaaaaatatatgaatatatatactctctctctctctctctctctctctctctctctcacacacacacacacacactatatatatatatatatatatatatatatatatatatatatatatgagaatgggaagaattcaaaggagaagtcacaataaaattgccagtcaaatcaacagcctttcgaccagggaaatagggaaatatgtctgaaggaggatgacagggagccaggaggagaggccagctgggaaggatcaattgctaggcagagcctgaaccactctgccagtctctctctctctctctctctctctctctctctctctctctctctctcttctctctctcttctctctctctctgtctctctctctctctctgtgtgtgtgtgtgtgtgtgtgtgtgtgtgtgtgtggtgtgtgtgtgtacacgaatatatgctgtgactgcatgttggtatgtgtgttcacgtgcacgcaggtaaccaagtacatacatgtgtacacttggttaacataggtcctcttcctccactatttttgcatcagagtctagactggctggccagagagccctaggaaccctcccatctccatgctccacccctagcattaggttacaggtgcacactatggtgtctggctttttatgtgggtgctggggattcaaacgcaaattctcacgtttgggctgcaagcatcttgctcactgagccatcccttcagttcctggaatgtttagagtaaactattttcttaagaaacaaaacaatagcacatttctgtgctgatgtccactgcccatgcttggggcaccctccatgcgtggtgctcactcttgtgtgtctgtttaaactcttctacatatctggatgcccggggaacataacacagtaagaaggggtaaagcagaagagtagggagatcagaactgtctcagaaaagttctgtagaccgtgaatggccacagcggagggacagtggaacacttccacaacacaacaggatgctaagacagccatcctcacccaagggctatgatggtgcaagggctggcgcagccgggtctggtaagcagctagctacgggtgaaccacagcagcaggaaggccatctgtgaaggagtgaggcaggggacagttcccaggcagatgatggggtggaaggcatgagagcctgtcaaggaacatccgaatcatcaggaataaaagccaaaagcacaagggcaggggagcctcgacgcccagcccagggaaagtgaccccagcccagggaaagtgacgcccagcccagggaaagcggcgtttgagggcccaggagaccacttgggcaggcacaggcggggttaggatgtatgagcgaggaaaaagcatgaccaccagtgggaaatattgagtcagctcaggaaacagctgctgcctgccagaggcccaggcacggtgggatataaatgtggagccctcaggggtctatctggggttgtgttcagaggacctgacacatcatctataggtaactcctgacaaatgaactttcatgaaatctcctttttccctctgggaacacacaaacggcagcggtccaccttgtgatctggggacaggcccaggatgccatcaccacccatttcagttctgtaagtaaagcaagctgccttggtcatgagcgggatggcaagactgtctcactctttaatcaaagctaatatctaatagccagtgtggtgacacacctttgatcctagaaatcagtaggcagaggcaggcggatctctgttatttgatgtcagcctggcctatacagctagttccaggccagccaggactacacagaccctgtcttgaaaataagtaagtaaaactaacggctaaggtagggaagacagaccagttgataaagtgcttgccaataacgcacgaggaaaaggatttgaacccttgagacagtaaaaagccaagtgagtcccattggtgaggtgggaaggggacataaaaggatccacaaaactccgtggccagcttggcctacttggtcaagtttcaggccagtaagtaaccctgcctgaaacaaaatgtttttccagattttcctctgcaacatgcatgcacacatacatacatacaaaccaggagtgtagagctgcatgctgaaggggtttagtgtcctgtccttcttgaatgcgaacagattaacagaagggacacagagttctcagggctaaaactactaagcaactcagctgtgtgcctagtgtacaactcttctacggaatccacagtcatcgcatctgcaaaggttgaagactccgggcaaggcaggacattagcaaccctatcattagggctgggggtggataaagcccccgcccagcaagtctgagacccgccatgtgggcatggcagcctgtctaatcccagcccgccacaggaagacaaggattcctggagcaagatgatttagctagattggcatactgttgagttctgggttcagctgaatatccctgcttcaatacataaactgacgagaggttgaggaaacattcccacataaacgtgggtctctcaaaaaaacacacacacacatacacactgacgtgaaaagaaagaaaaatattatcaactttggatggtgtcttagaggtgtgatttgtttccacacatgaataaatgaaatatgtacaggaacacagatatctgtttaatcttttaaactgggagttaaaaagatggcttagtgatttagaacagtggctgctcttgcagaggacctgggttcaattcccagcacccacatggtggctcacagccatcagtaactccagtttcaggggatctgtcgccccttttctgatctttgtgggcacctggcatgcatgtggtgtacatacaaacatgcaggcaaaacactgagacacataaaataaaataaataaatctttaaagaaaatttaaagttttaatcatatgcagtcattgtcaagatgcattcttcctaggaccattgctgcccatgagaggatgggtaccaaattctaaagcaagatgcactcctaaccctcaggtctgcatctcaaaaaggcattcattcactggagtgtataatactttttttttaattaatttaacttccttgtcggcaaactggcgctaacagcattgctccagccaaagcctccacagggagatgtatcccttctgaaagtctgggcctcaaaaaggtggcaatgaagtaaaatgagtttacacggggtacgcttgcccgagcaggggtcaaggtgttacatggggctacaaagaaaaacattcctactgctagagaggtgggattgtgagtttgaagccagcctgagctacaacctggtatatacttaccccacacacatggtccccaaagaggagaggagtcaaggagggactcagtggccttggggaacggcagcagggaggtgtgcttagctgagaatgagaggctgagcagacagacagggaaaaggcactctgggtggggacaggataaaaggaagtaagcgcagtgcacaggacagagtgcgccagtgtggagagagggagagcacaggcagccctgggaaagaagcttggccacaagagcaatggcatgcaagcggctttagtgatttaaataaaaacttcttttttctttttcttttttttttttttgagacagagtttctctgtaggttttggaggctgtcctcgaactcactctgtagaccaggctgtccttgaactcacagagatccttctgcctctgccttccgagtgctgggattaaagacgtgcgccatcattaccagctaaataaaaaatgtaattatgttcttaaagacccccccctttttttaacagtactgaaagagtagttagagacctgtgaaagtagttagagtacttagagacctgtgaaagtagttagagtacttagagacctgtgaaagtagccctcaacagtcaacactccatgggcatcagcgatgaagccaagctgggaatatgctaaagagcccagctcaaaagacaataaaaaacgactggaggtttgagaaacggttaatttcagtgctaaggatggcatgttgggagacaaacaagcacaaattatatatataatatttttaaatatattatgcatacatatatgtataaatgcgtacatgcacacaacacacacacagtgaacaagtgagagactaccacagcaagcctgagggccaggggagactagacaaagacaagacatctcggctcagtctctctcagaatgctttgctcgggaaacaggggaggcaaaagcaatacacaggagctcctggaaggggaagttgtcaagcttgccccaaagctgagtggagaagcccccggctgactagtacactctagggtttcaaacttactgcctcagctaatgcaggaaaggggtatgagaaagacaaaaacaaaaaaaccagaaaggaacttccaaagtgaaaattcagtatatgtaagctaaaatacactgtgtataagtaaaacaccttcacagggaccatagctgaggaacgcccactaattctcatcaatgaataacatttctctgtgagataaaatcctataagccagtgcttcccagccttaccaatgctgcgaccctttaacacagttctgtatgttgtggtgaaccccaaccaaccataagttattttcattgccacttcataactgtaattttgctactcttatgaatagtagtcatgtaaatgcctgagtttcctgtgaaaaggatgtttgaccccaaaggggccacaacccacaggttgagtggggcaagacaaaatagatctaggagtatagatctaggagtggtccctcaaaaggcttggtaagttaggaatacagctgcacactaaaatctcaaacactacaaatgtgaagatgttattttaaaagatttattttacttatattcacatctgtgtacatgctcatctgtatgggggtgccacagaagccaaaaagagggggcctcacccctggaagccggcatgattgctaagaaccaaacccaggtcctctgcaagagcaccaagtgttcttaaccacccagccatctctccagctccccaaaatggtaatttactaactccaagaggctacaccaccaccacactacccctttctgtttttcctcaccagaatcctttctccctataggcagacagtaagcattcgtggggtggtcacctacactacagtatctctaactacaaaggtcccttgggcaagtcaggctgagggactaggctcaggatgcaatcttggcctgggtctaatttaactgcctgaggattaagctaaactatcacatatcaaacttcacatgtaaggctggtgtaccaatgactacagcaaacaaaagcatggcagaaagggaaggaacacagacccacaaaggaaaagaggaaagagccaagcatggtggccaacacctctaatagcagccagcattctggaggcagaggcagacagatttctttgagctccagggcttcatagagagggtctacttcagaaaaaaagggagggagggaaggaggcagggagggaggagggagggagggaggaggaggggagggagggagggagggagggagggagggagggactgcaaaatcaataccccatttagaacccaactcagattcagccatccttaccatgcaggcacaagcttcacgaaactgtaaataactcattttcataaccagtgtgcatgcaacatatgttaaaggcacagaagaataaatttcctttctcctcccaactgcaaaaatcttacatttttctaggctttgttctcctgacccttcccggcctgcatgcaattctgtagatgggaaatttacccaaatctttgtggtcacaacccatactgctctaaggacacaccagtccccctgacgatgcccgagtccctttcttcactggctccctcccaggaagttgatagggagatcaatgagttcatgtttgccaaatacttcagggttctcggatgaaaggcaacatcaaaattcaagccacctgtggccggccttgtactatcgtaagctgactctgtactgggacttcaaagaaggaatgaagggtgccgaggaacgcctttgtgcgcagctagtttctgcacccttgctaaacacaggcagtgatcccaacatcctttaattaacccgatctcagcattcgaaatgcaaagagcctgcacaacacactaggcccttgtcacagaggagaacagtctttgccccgccttcttcctggggtacttcctactgcctggggtactgaggacccccttcagtgtgaaggggcacaggcagctgccagcctgcatgcttgctgtgagccaatcgtctaaagcaaagtcaaggacaacgctctatgtgtatgttggcacacatgtgaattcaggcccccgctgagtaacaaagaacacattcatggccacatacgaggccgccaacacacaaacaccaccctgccttggtctttcaggccgttcatcatatagcatcacaccgaaatctcaaagatgccctggcaagctatgtcttgctggctccctcttgcagatgaagaaactgacagtcagaaaggccatgaggccggcccaacatcacactcctaaaaagtagcagtgctgagctggccagacggttcagtgggtaaggaagtttgccaccaaccctgaaaatctaagtttgatctctgggacccaaatagtgggaaaagacccaaccctgacttccacaagcatgctcacacacacacacacacacacacacacacacacacacactaaataaatgtaaaggaaactaaatgacagagttggaattcaagtctagctgtatttcagacacacacacacacacacacacacactcacactcacacacacacacaccacaaagttgcagctagtagtcctgcccactcctgggaccattcaatcagcccttctgagtaggaggggggcaaattaaatgcatttactcagtctgggagatcagaaagctcatctctgacacacttcctccctactgaagcgttggtgtctgtttccaccaccccccttccttaattggctaattaagtatttcatcttatctcttctcctgccttacctccaaccaagtgcctagcagtgttccaaagctcggggtggatttgaaaaccacacacagcacttggtaaccaagcaatgaacagctcaaatgcaagaatgtgaccaaattcttcctccaaaggggaggagactctggaacccaggtgagctcaatttgctaggaaggggttgatatttgcatccccagtgggagcttaatccagtaagaaagcggtgctagggaaatcctcacagttctagacttctgctggttcgtggggcgaggaagaattctcctggaaactgaattctttgaggtgttccaatactaaaacagtctccctgactggtgcttctctcccaattgaccatgcaacacaagacacacaaacttgactgactgtggtactgcgagtatgtgcacaccaacaggaggaacctgggcagagccccaggacaggcaggaaaggaagggcctcttggcacacacttccctcaggcctgtccccgccacacgccttccagactttccatcgtggaactacttgctcttgatcagagacgggctgagacaaagcattgaataagcaccccccaagtttgcagggagccactggtatgtgccgcctgatgtctctgaaggctggggatctggcatctccaccaggagcagccgctaggagctgggagagcagcacctcagcccaggaaaaggtccctcagagaggtgtagtggacagtcacatctctcaggatgtgctgggccctgcttacaaggatggtagatttcagtttccacaggttcagagaaaggaaaggaaaccccacgaggatgggggaggtatcaatgacttttaaagcagcgaccctgagacacagagccacagccttgagctgattctgcactgactgccacacattcagactgggtaaaaggacatcatggtacccaggtccagctcaaggaagctgttagggagcttgggcgggggcaggcacttgcttggcgagcatagaatcctgcctgggttctgtccccagcaccaaaggggacacaaagcgagctgtcacttctaagacccaagctgttctgcccaaaccaaaagctctctcaggacaaggttctgtggtggtgtgggatggcccccactgggatagacagtgcggtccagtggatcaattaataacacctgtcacccccacagaaccatctaggagagacatcaggagagggaacatgtccaaaggggaagcttggatccctggaagctactcatggtcacgggaagtgggtagcaaacttccggtttcgtttctgctggggtgggggctaaagatgccaacagcagggcaccaacctgcccatgcgtgcccctccagccaccaggaccttctgcagccccctccgcgcccctcactttgcccaagctgctccctctggaatgcagtcccccagccactccagggttgagcttcactcccttgacgacgcaggtgaccctttcctcggggcctggccttacccaactctggcagcacagtgcccatccgcccgcgggccgcctgcagggcgctgcggactctcgcgtggagatctcctggcagagtggaagcctcggcagggggtttgttgaatgaatgagggagggagggagggagggagggaggggggagggagggagaaaggagggagacaacatatttcggaaattctgaccatacatttcaccctagcagttcactaacgtcaaaaccgctcgatctcctccaactgtggacgggggtgggggacaagccctgaaggaaccagggccgagggaggcagtgacagcgcaccccgtcgatccctccaggagaggcaggagaccccagctcgcaacggttccaaactagacgtgaggtcacgtgggaaaggagctgctcgctctcaggagccgcaaagttcgaggctgccgagacctggtctgaggtgatggaggccgcaagttttccctgcgcgtctgtctgtccgacccaggcgggcgccaagagcttcgagcgttgggtcacagggctggggcggggaacgggcacgaggaccccttcccaaacccagtccccaccggaggcgcgctggcaaggttccggcgctgcgctgcgttccccggctccagcgcacgcacgacatcaaggtcggggacggccggcctggggacctcccgctgcccgctgcccgctgcccgctgcccttcccgggactcccggactcccggactctctccctccctccctctccgcgcgcagaaaagaaccgcgagctacaggcgaagccttggccggacctcagagtcgcagaccgcgcgccccttccagcccactccggggcgagcgagccagcgagcgagcgagcaccgcccgccaagagagaagcccggccgctggccacccggcccccgccgcgcaccccggcgtccccggcgtcgacccaagtaggcgctgccccagcctctgctcgcgcccggccggcttacctgcttacatggcccgggagtgccccgggtgcggcgcggtgaccatcggggagcctgggtccccaccactggcttccaggagctggcagagggagggcacggggagggttccgccgcgccgggagctccggggaggagaaagggccaggaacctgagcgccgccgtcccgcgcgagggggccggggcggtcagcgaggtggggcgccgcaagggaccgccagcggccaagtggcgccagatgctgctcctcgaggacctgccctggggaaccagaccggacggctaagccgcagagcgcagcgagccggcccggacccgcggccgcggcgctgggcagcggcgagaagttgtgcagaacttgagccgccgggagagcccgagtgccaggaagcgctagcggccgggagggcggaggaaggggccgggtggggggacgagcaggcgccgctggccgcgctcccccgccccgggctgggctcggcggctctgggggccgggaggcggggagtgcgcgaggggcgctctctgggcgggcgaggaatgcggcgggctggggagggcgcgcgccagcctcggggacgcgcgcccagcgctgccaagtggagcccgggctcccccgctgcgggcgcacggtccccggggacgtcacagcgctggaatccgaggaatgccgggctgcgggagctccttcggccggccgggcagaagtcgtgcacttttaatgggctagctttggagcgtgtcttccttccaaagtggggggctgtggaaggaaggaaagcgcctggagtaggacacaccgcaagtggagagggggaggcgacccaagtcaacccagctgtgcgacgctccgggggcggatgggaaagcggaaaggagaggaccgtccctcctagatttccgtaggcagctagggggtgggacgctggagccagaacaggccatttatttgggggaggtcttgccgccaccctcccccccccaggggacaccgaacaggacaaagtagggtggcctcctagagcaggcaatctaggagccccgcgcagaatctcaggagtgagctacacttaggtccggtcctcccaccccgcccccatggccaaccagcctttgtgtgctgggagttggaatatgtggttttcccggtttgttccatgccacggaggggccccaccccgcctgggcactgggagggagctgccctagcactttcgggggtggggttactgaggcgcagccggtataatggaaaaagcactcagccgggcaagggaacctgtcttaggccccactgagttgctgaccccgtggttaactcgggagggagggttcccccccaatcctgatcgtcggttttgttagttgtgaaatgaaagggtttgcctgcatttctaaagtgttttgcacgtcttggcatctgttctctttctgaagtctcaagctcagtcctttcaagaccccccccccagtccttgtcagagaagatagtgtaaattacttaaacgtacaggccaaagatacgaacttccaggctttattccatcatagtggcccatgccaacgctctggaggcagagacaggaaaatcacaagttgaaggctggcccagaccacatagcaagaccctacctcaaaacaaggaagaaaagtacggaatcgcttgtgcccacggagcatattctgcaataatcagcttctgagtattttgcctgtctgcagaaccacgaagaaccagagaggacccagaggggatggaaatgggatgcgtagaagacaaaggactcaggagggtcaggttttcaaaaggtcaaagtgatcactgtaggagacttcagggagggctgcagtttgtggcttcgagcgtgggcgatattctacacagacatgcattaccatcaccatcccttagagaagacagaggaagcagggagaaagggcctgccccaccaaggaactcacactgctgaaatgggatagaggatcagtctgcacagtagctggctgctcttaactgcaaacatttgactcaaacaggactgggctaaaagatagggtgcctaaaggcttttcatgtcaggctggctgtggccttctagggcacaggaggcccttggcatcattcacagtggcacatagatgttgtggctcccaagtcactcaagccactgagcacagcccccgaggcctctgtggtctagaagaaagagcaaaggatttttgagcaggtacaagaattggattctgcctgtgaccagccatgtgaccctgagcaagccacttaactgaggcttgagtttattttgtcggtggagtgtgacatcaaggacagagtttggttgggttagctgagtcttgggctgtgaccctgcttgagtgtctcctccagacacaggcatgtttgtgatgtttgcagaggaggctaggcaataccagagctggaaaagctgcccaaatgctgccttcagaccaacatggatgctagggtccagtgagtgaatgccgctcggtttgcagctgtcagtaaagccaaggcttagcactagccctgtgtacttgtttttaatttttaaatcaatttattcataaaagtaaaattcattattaattttttagtaatttatcttttacattccaatcctaggtccccctccctcctctactcctgctgctcctccttccctcccccctcccacctgcccctcgggagagggtaaggcctcccttaggaagtctgctaagcctgtcccatcatctcatctggctgaggccggacctatgaggtgcatctggctgcctttagattggaagtgtgctttatacacacatgcagagagagagaaactgattttttaatgacttggaagttgtaggttgcttctcgtgtatgctagccatatgctgacccactgagatataactctttggaagtagaaacccccagtgtgaacctgagggtgtccctcagtatatcgtgcttccatgcctagtactgggagaggtgtggggattctgccacgttacctcatatttataatcctggcactcaggaagctaaggcaggacaacttccatgagtttgaggtcaatgagttcaaagccaacctgggctacatagaccctgtctcaaacaaaacaaaacaaaaggcagagttgttggtgcaccaatgtgaggacctgagttcagattctagcactcttcacgaatggtttcacctgtgcctgtatcccaggactgctgggagcaggggataactgggacttactggggccagccaagtcaaaacaacaacaaaataacaacaaccaaaaaagtaatgaaacaaaactctcctgagctccatgaacttctgttcagggagagacccagcctcaaaagaacaaaatggtagcctggcagtggtggcacacacctgtaaggtgaatgcttcttgtcccagctaggccctgccaccacttcagcctcaaagaacacaaaggatttatattagttataaacctattggccagtgactcgaattttctttctttctttttttttttttttttttttttttttttttttttttttttttttttggttttctgagacagggtttctctgtagctttggaggctgtcctggcgctcgctctgtagaccaagctggcctcgaactcacagagatccgcctgcctctgcctcctgagtgctgggattaaaggcatgcgccaccaacgcctgctgtaactagcatttcttattgactatctctgttttaattattaatctatctctattaatctcagtatttcaaaaaggtggtcttatcttatcagagagatgcctcactcatgtcctctcttccctggctcacacaatgactcctctccccctacacttcccagaatcctcattgtctcctagtcctatctatcatgctgcccggccaatcagtgtttaattcatcaaccaagaagacaaacatacacagaagaacattccccttcatctcttttctaaaaaaaaaaaaagaagggttctaactttaacatggtaaaattataaaacaaaattatataacaaaatagttattagctgagtcagtagagaatgagactcttaatttcagggtcgtgggtccatgccccatgttgggagccattttgatatggaagttctttcctgacagcctgatcccagcctcctagagccccaaaatgaacactcagagacttatattaattataatactgctggccagtggctagggctgtcttaattactaacccatttctataacctatgtatttccacatggtcttatctaccagagaaagaatccggacctgttactcctcttgcatcctacatggtgactaactgcctacatttcccagaatcctcctcatcacctagacccgcctatcttcctgtctcattggccactgtgctttattcatcaatcaataagagaaacatattacagaagacaaccccatcacacacctttaactccagcactcgggagacagacagatctctgtgagttcaaggccagcctggtctacagagagagtaccaggacaggctccaaagctacagagaaaccctgtctcggaaaaaaaaaaaaaaaggaataaggtggagagtaggggaggatgcccaatgcttacctctgggctctgtgcacatggaccacacaaaccacacacaccacaccacacacacacacacacacacacacacacacactcacacaccacacacacacacacaccacacaccatacacaccacacacaccacacacacaccacacacacacacacacacatacaccacacacacaccacacacaccaccatactcactcacacacaaataatacaacttgagttaacaaaaaagaagcaaaaaacctagctgtctctaaaagaaaccaaatacatccccacccctctgtctccctcccttctcctctctctctctctctctctctctctctctctctctctctctgtgtgtgtgtgtgtgtgtgtgtgtgtgtgtgtgtgtgtgtgcatttgtgagcaaacctgccaataggtaagtgtgcactctgcagtctccttaggtgcctgagtttgacaggacttaaagtaatgagtctcatgtttactttcaagttttacatttttagggacttgtggatattaacttgttcaaagcaatatatctcctcctcctaagcttgactctaactataaatgcagggtgcaaagcagactctcagggccctccatggttccctcacctccaatatgttctcagtaatgtatctctttcacaccttcaaagacactggaggccctgaaagtaaagcaagttctgggagatggctcagtggaaaggcacttgactttcaagcacgaagaactgaatttggttccagcactcacataaaaagccaggcatggtggtgctcccctgcagtcacaccattgggaaggctggcccagggtggtgctcccctgcagtcacaccactgggggggctggcccagggtggtcctcccctgcagtcacaccactggggaggctggcccagggtggtgctcccctgcagtcacaccactggggaggctggcccagggtggtgctcccctgcagtcacaccactggggggggggctgacccagggtggcgctcccctgcagtcacaccactgggggggctggcccagggtggtgctcccctgcagtcacaccactggggggctgacccagggtggtcctcccctgcagtcacaccactgggggggctggcccagggtggtgctcccctgcagtcacaccactgggggggctggcccagggtggtgctcccctgcagtcacaccactggggaggctggcccagggtggtcctcccctgcagtcacaccactggggaggctgacccaggaagatcccaattgtcagatcagtgaattccaggcgcaatgaaagaccacctcaaagacaaggtggagagtgacagaggaagacagccggggtcttctggctcccacatgtgcacacatgggtacacatgcacacacacaatacacaccccagtttttttaaactggagagagagtaggttggctttatttgaaaaattctgatgatctctaggggctgtctatacactctggaggagggctctgttaataccttgctcgcttttctttctgctcgtggaggtgacacgtctgtgagcacacttcagtgtgcatcgaattttagactggatgtaactgcaccacaacctgagttcagtacaaagcacaaaacttaggtctctgaagctcaaacacctcttgtgcaggtgaccccagcccaggtcaaggcaaagtgtctaccacttcaggaaagctccctatgcaacttcccagccgctatgtgctctctgttgtcacatgccttgtgagtcctcagacttcaccccaatgaacaaataatctgcatggggaagctgtccccgttggctcactgtgtgtcagttcatctccctgcacagcagggtacattccatggtgtgaacagtgccaagctgtgtttgctcattctattgatctaataaacaggcgtatttcagaaacacttctcaagtgattctgccgcgcttgggttgcaggtcagagcctctggcttacagcaaaaatataagataagcctagaccattgacacctgaggaaagaagtaaacagatcacttaggaatgctttgatggagctgggtaaagtgcttgccttgcaagcctgaggccctgagttcaaaacacctccatacccatgttttgttttttgttttttaaaaaggctaacatgatggcacacacttgtaatcccagcactgaaaaggcacagacaagtgcctggagttttctggccagccagcgtagcctactcagcaagctccaggccacaaaaccctgtgtcaaaacaaaatgaatgatacctgaggagcaatgtccagggttatcctcaggcctctgcacgcatatgaatacaagtgcagccccaacacatatacacccaaaagaatctttcaactgtgtagagtgctgtggtgggttttttaatccccctgttgctatgataaaaaatatcctgacaaaagcaacttaaggtgcgatgaaaggctcacttggctcacagctccgggcccagtgcatcatggtggggacgtcttaggggcaagagacttaaggggaggcggaagataaatgagtgcacctttgctctgcagcttcctttctccatctgcacattcccggaaccgtgcagtgggcagattgtcccaccccagttaactcagtccagaaaagtccccaactcatgttcaaggcccttccccatcaggcatgttcagaggccctccgccccacatgttcagaggcccttctccccatgcatgttcagaggcccttccccctaagcatgttcagagtcccttccccccaagagattctagagcctatcaagtttatatcacaagatgagtaaaaccaagttaggaaactggaaggtgaacttccggggatctggtgggttgttcttttttgttttggtttggtttttgttttttttaagaggcacaattgtttgtgaagagctgtcacccacaaccacacatgggtcacagttctattccagaagccagtatagactacatacagtatgagtaacaacctcagaggctgtgccacggtgggcgagagccaatgacttctgcctttagtgatggcttcccagcttctgttctcaaaataccatcgctgatacaggagatgggattcctcctccctcctggtggcacctttgagggctttcagtttgtggatgacagttgccctgtggtgttcatcctctccctaggccagcgtggccaggaagtcacactgtcctggatcactggggaatcactggcaatcaaagtggggtaacacaacacttttgtggagacacagctttaggctttgaacgtgaaatgtcacctccacaggctcatatatttgcatacctactccccagctggtggcaatgtttgtcaggttgtgcagccttgggaacctgtgtcctcactgagggaggtgggtggttggaggtggcctggagagtcacccccagatctctgtgcttcttcttcctctgccacaagcagccgctggacacttcctctggactgtgggtgaatcaacccctccttccctgaagttgctgcagccaggtatttccacagaagcaagaaaagcaacgggcacacacaggtgaggcaaaattagaaagcacgtatttgagttcctcgttagtccacttctcatggaagctgagtgtctggtcccctcttgtcactcatgcttgcctcacactctaaggtctcagaactcatcccaccaccaccactttggccacctctccatctcatttctccttctctttcccatgtctcagatgaagcctctctactgtcccttagtttgaagtaccagagagaggccccctaggccttgtataggtgcgctgtttctcttacatccttctggagagaatgtcaaagatgcttgggttgtagatttttgagctgggaagggcacatggagcccccctcctgtgtgggtactgggctggatcctcagtgggtgaccgtgtgtacacaaggatatcatatcggtgtctgtacatcaaaaaggcagtcttaccataggcagcaacactgattttttcaataaaaatgtacaagattcggctaatcgtttactttttaaaaattccaatgataacaatatatgctgaacaatagaccacaaaacatgcattattacatttattgttgttattattattaattacacaccttattgacactaccaggaagatctaaaagaaatgcaatctaggcatattgaagtattggagcctatgcctttttatataatgtcacaattctctacttatttaccttcggctgcacacactgactctagtagctccatggtgtaagcttcctcaccatagtccccagactctgtctgctgacttgccacttccataggctccaactttgccttctagccttttttcttggcagaaataatcagtggctcttccaacacacaccttacgtgtcttggtgctcttgggcccacctgtcactgagtccttgcaggagtacactgtcaatgacgagcttaccccaccggctgcagagacacatctgagagcgtctgcaagacagtcttggttttcatttgatcaatcttgattgtcatcactttaaaacggaaaccatagttatttacatccgttgttaagagatctggcaggcaagggaaatggattcagtaaaagtttcctcgatttatgaagaataaaagcctatttcgatttttttgttgtttgtttttagttttgttttcgacagtgccttactttatgtagcccttgctggcctggactccctccataaaacagactgacctcgaactcacagatatccacttgtctctgcccttcaagtgctgggattaaaggtatgtgccactatgttcaattcctatctcaagcttttgtagggggaaaaaaagaacatgtcatagatagaattcacataaaagaagagtaggggcctggagatatggttcagtgctaagtgcttacccagtatgcaaattagaccctaggtactgtaagaggaagggaggaaggaagacaggaaggaaaatgggggccagggcccacaggaactcatctttcctctctggctaggaatgccaacttctacttttgactatacccaggctaatacctgtgcaagcctaaaaaagcagtccagatttctcaagcctcagtttccttctctgtaagaggggaataccaaagtgtgtgctcactgtgtagtgttggtagctcagtcatcagtgtgtggaaagccctgagcagcacacctggttctcagtatatcacctgctatcatcatcatcctaattatgcctttaccaaatggacagggaccaaacctcacatctacattcccaaccaaagaatcaggctgagtcattagcccagggcgggaaggaaggctgtgataaacaaacagtgagggacccaggagatctgaagccacacccatacagaagtaaaaggaaaggcttggggttctctctgctcatttatgtccacaccaccgccaggccagacctggcttttcgctgtagcaaaggcagtgatgcagagaggtcagtcaggaggccagtggctattgagaacttccatgctccaagagacagggacggtgccatgcatacatgctctaaaatagctctctgtaacagtattcaagtgctggggactgagctgtgtccctcccagattcctgtgttgaagcctttaatccccagcaagacttatttagatattttccttaagaagataattaaggttaagttgaggtcacaagagtagggcccctgagtcaggtagtggagctcactgtctttacaagaagcgattttcttgaatgcacactgaggagagacaggccaggacatcagaagaggcgccacctgagatctgaagacagggcttttgttgttgtttgcgacagagtttctctgtgtaggccggacccccatcctagaactccctctgtagaccaggatagcctcagactcacagatgcctttgcctctcaagtgctggtcctaagctccattactgcccagctaccacctggattcctatttaatgtttgtctccttctagtaagtcctgaatgctaagtttaaccaaaaccccaagaggctaacatgtttttcttgtttttctcatacatctttggctttttgttttgttttgttttatgtaatttaaatacctacatgaagctgtcaacaaacaatgtaaaccaggtttgtggagcaaaaatgtaatagcctttcagaccaatgtcaagttcaaaagtgactagaaagtaaataagaaaaaagttacatttgttttcggcatctgaagacatggccataacacccctctgagggtgtgcacttgaaaaaagccagaggccagcaataaccttctcttggggagtgggcaggagggtcatgtttgggatgccattctgaagaacacggatatggagcctgaaggttgagatagggtgaccatgggatgggccaggctgtgtaagagaatccagcagtgccaaatgaaagttctccctcaagaccaggctgcttcctggcctcttcccagagaatgagtgggtgactcagtgtgtctggctctggcacttcaaacacacatgagcaatatgcatggccgactagggcaattagaggtccagtttggaatggccattgagcattacttcctgtggccaatgggaaagggtgaattacctgggaagctcagtcttgaggtgcctcctgctacgagtgtgaatcagaagtctctactgacatcagacatactagaggctgcaaagatgccaacgtgagaaagtgcctgcagatttcgggattggcacttctgatagtctgggatgaataaaatggggagaacacatgttttgttttcttttgtgacaaggccatccataacccaggcttttatcaaactcactacagagcaaaaataaccttgcatttctcaccctccttcctcagcctcctgagtgctggaactacagttgtgcgccactaggctggctaatgctttactggggatgtagcccagggctccatgccacactagcaagcactctgctacctctccagccccaatgaacatttgcaaatggtgaaagagagactcatcttctccaggcggatgaaggtggtctcgctgcccttcactctaatcgtggtccagctcctcctccctggctcattatatcccaagtgcctgggaagtggagacaggaagatccctaggctcaccaacctgctgggcactgccatctgcaccagatttgtaatttgaacttggagtaaattcaaggcacctcagctttggagaaagcacacatagaatccctaatttaacaaacatgtttgtttggtttgtgtggagggagagctcactgagagcaagcagccatgcatgtgatgagggctccttttccctgtggacaccaataccatgatagaattatttcgatagctcactgaatttatatataacctttcaaacgtgtacacatgcccatgcccatggcctgtcatcgggatttcaagtcccaaaacctcagtctttatgcatgtagcctttgtaccaaagtgactgcttattcctagcggttcagtttggcgggggggagggggtggcggaggcagtggtgttgtttggttagcagtgccggggactgaaccccgggcttattgtgagggacttgttattttatgagttcctgtcccggaactcatcctgtatcccaaatgggatttgaacttgtgatcctcctgcttcagcttccaaagaagcttggattacaggcttgcaccaacaggtccagtgcacttcagttttttttattattttttaattttttaaaatattttatttatttattatgtatacaacgttctgcttccatgtatatctgcacaccagaagagggcaccagatctcataaccaatggctgtgagccaccatgtggttgctggaaattgaactcaggacctctggaggagcagtcagtgttcttaacctctgagccatctctccagcccccagttcttttaaaaataatatttcccaataatctgtttcttccaggatcattccattaaaaaaaatagttgattaactactcacaatagatttgcacaggtagagagaaagttaaaagaagattcaggaggcataaaaatctatatagaaactcagtgtcctgcttccatgaaccgtctttagaaacagatagaggtcagttagtatggctcagccagatacccgttcttgctgccacacctgagaacttgagttcgatttctggaagccacatggtggaaggagaggacagatttagaaaagctttcctctgacctccacacacatgacctgtcttctcacaagtatacatacaatataaaaaactaattttaaaaagattaaaatcggatagaaaccctccgtgtacatgggtctccttacccctgctctggcagggagggcccctccacatgcgggaaccacctactcctgcccatctgccaagcaagcgccatatgtcctataaagtgatgcaatctttgtgtgaaatgattttcctgacaaggaggagcatctttttttacccgattttctataaactccttataaacatttatatgattatatttgtgaggaccatgccttcctctcttgatatcttgcttctccacagcccagaaacaatggaggtaaactccctgaaactgtccaccaaaagaaataccccctgcccgcttgagtgttcttacaggtattcgtgaaaacaacagaaaaaaaaaaaaaaaaaaaaaaaacctaactcagtcagtgtggttgttaatactgtcaacttgacagacaaaacaaaaatgaaaattgagagaaatctccctgatgaacttaagatgaaaaaattcccagtaaaacacccgccagctgaattcaagaactcatccaaaagatccctcactgtgaccaagtggcttcacacaaagatgtagggatgatctaacatatacaaatcagtgaacagtctcaagggcagaaatcacttcaacagaacccagtccattcagtagccactactcggttattcaagcttgatcttccaccttctgtcttcttcacaaatcccaccaaccaatcctgaatcaacctgtgacttctattctgccacatgctggggcaaatgccatcattttcccccagggatcaccatcctagctttttcaggcatcgatcttttcacatttagtcttttttccatgatgcagtttccttccaaactaagcatccagcatccagtggcttcctccagtgtcctagctctgccacttgcctttatttattgtttattattattattagtttattgttcttaagacatccctctctctctctctctctctctctctctctctctctctctctctctctccaccctcttcttccacctccctcacggattagggattaaacattccaaacatgtacactccaccaccgacattcctggactttcacttcctcacacctgactgcctgcctcttgctgtttcagaatctttgggtgtgttcttttttctataaggcgcatgctaccctctgcttttcacgtaattggctcaatattcattggagaccctttaaatatctctttggtagttcctgatcacagcatgccagggttctccagagaaataaaatcatggcataggaagaaaagtaaatctgctgtgggatgaacggatgatggatggatgataatggatgatggatggatggatggatgatggatggatgatggatgatggatggatgatggatggatgatggatgatggatggatgatggatggatgatgatgatggaaaatgaatggatggatgatggattaatgatgatgatggatggatggatgatggaaaatggatggatgatggatggatgatggatgatggatggatgatggatggatgatggatgatggatggatgatggatggatgatgatgatggaaaatgaatggatggatgatggattaatgatgatgatggatggatggatgatggaaaatggatggatggatggatggatggatgatggatggatgatggatggatggatgatggaaaatggatggatggatggatggatggatggatggatggatgatggattaatgatgatgatgggtggatggatggatgacaggcagttaggtaatagatggtagaggcatagataatatattagagaatgatagagatggacaaacttccacatttaggagttggcaaagttgaaatttgttgggtgggttagcaagctgcaaattcttgtgcagaatctggagctgcattctttgggcagaattttttctctttcttggggaattctgttttgttattttttttaaagatttatttatttattatgcatacagtgttctgtctacatatacccctgcatgacagaagagggcaccagatctcattacagaaggttgtgagccaccatgtggttgctgggaattgaactcaggacctctggaagagcagccagtgctcttaacctctgagccatctctccagccctttgttttgttcttaatccctttcagctggttgaacacttaggatatttaggataacttcctgcctttaaaatctactggataattgtttgcataaacaccgtatcacctatttttctaaggcaaaatttccccttgttttcccaaaatttaagtgtcaaacactgtcaaaatgtgaaagcttcacaatcaatcctgccatgggggctgcaagtaggtcctgctaaggagaagacaatgaagctggtcctaattttggcaggaccccctggcaccccaggaaaccccctcagagctgtctgatatttaggtgagcacttcagatactgcttttctgttcagcgtggcttctcaggaccatgaatacgttgtgcttgtacttgattgtgtaacaatctgttccccacaaatcagagtcactggacgcttatgaatcctgaaaataacttttctgagatgacataactttaaaacaccctctttcccaggaaaagcaggaccacatgcaatgggagacactgggtcctgctctaaggaggctgaagtcagtgaggtttcagtgtaggcgttcaaggccagcatgcacaccaacatagacttcgtctttttttttttttttataggactaacaagagagcacttactattgtgaaatgtctgaggaaatattaatttaggagagacagtgcctcaatcattttccagtgtgctcaatagttactgttgtgtttatgggaaactatgtgtttttctccattacaaagggtgggaagccactggaaccaccaatgtccgactgcggtcagatgactactttagccaggattgtgctaaacttcccaaagtttgtaaaatctaggttgttgcaaattaaaagggcaaaaataagcctgtaaagtcattttagctaatattaaatgtaacagctgcagttacaagaagcgggggcaggagagctggggagtgaatcacagcatctcttcctttaccttcttctgagataatgatcctcctttggactgactcacaccacacggtggaggagaaggagggtcagacacggctgcaacttcagtctggtctgcttcgcttccttttgatgtccccgagaagggaacagaggtgggaattaacaagggggaaggggattctgcatccttcctgtgagctctgctcacacgggcaggttggctgccctcaatttcctttaggctgagaagtctagattcaccaggaagcatagtttctctcttgtgggtgtgggagatggaggaggagagccataaaaacacactttgatcaaatatgtcataatggcatccaacatattgtgtgcagcttttaaaaaataaaaacatttggaaaaaagaattgcttctctcttgtggaagttctatgtcctttcattattgttttaaaaggacattttaaaacttgggcggggtgggggggattggggtgggggtgactaaggagaaaatgttgtgtttgtttctttgctaatgcagggtttcccctggtgtctttgcagcatacttctgacaattctttttttgttgttttgttttttgttttggttttgattttttgagacagggtttctctgtatagctttggagcctatcctggcactcgctctggagaccagtctggcctcgaactcacagagatcctcctgcctctgccttccgagtgctgggattaaaggcgtgcgccaccaacgcccggcacttctgacaattctttacatgttattttccagcatatatcctgaaaccagtggaacacgggactgtatcacacccttcttgtcctgatttccctctctgttcatccagctagttggagaaataacttccattctctggattgctttgaaatggtaatgcccgggatgcttgcactgctgggcctgggaagcgcagtggaaaccacaggctggccaggtgcaagggctgtggaaagtcattcgtctgggctccacctctgtgggtgccgcaaacaataacatccaggcagagagatggtgagcgccttaaaaacaaacaaagcaacacactccaggaagggacacagattttggctctcgatgctcacctagctcaaagtttccaccacaaactaaacacacggtaaagcggcttgacggcaagggtgggaagaacagtaccatgcaagttaaagtctcctagagcgaggctcaggaggaccctggcttggtccctgaaagcaagttggggtttgagttagagagtggaagagagagaatcccaagcagaggacagaggggcacaaaggtgggggaagaaaggtggggagcggactcaggcttaggaaggttgtccacaccctttagggagatgtgcacagtcttctgtccccaggcctccgtgggactgggtcccagcctgtgctgctcagggtcaggcagcaagctttcattaagaacttttggactaacaagaaaattaatctcccattcagcaagttaaaattcaactctccctcctcctccccgttctgccaccttgcttcaagattttgtccttttgccttaggcctgcaaaagtacagggtcacaggcagaaaagaaaaggttaacaccccccacccccaacaactgagactactatttgaataactaatgctctagtattgtctgcattagttttctacttaaaattcaaggcagactcacagctatcccatacaagaagttctgctcttgctcagactccctccccccctcctccctattacacacacacacacacacacacacacacacacacacacacacacacacacgttcctgagttacaacttccctctttcagtttctagagagttctgccctggggtcattggctatggcttagtgcagggaccctcccctctgtctctgccgctcaggcaagcgtggatttacacaactcttgaaagtgctctgccatttcccccgagtgctgggagatgttgctggcccaagactcatgtcagcctccctgcctcctttccctttttctttttcttttccttccccttctcttcattcagttacttgaaacacccatcttttgggtgtgctggtctttggttgataccatctttgctcaaatgcctaactcggtccatatctccacatctctggggcaagctttcttgttttccaatcacacctggctggcagcagactgccggctgaagggctgaaaagccacgatggattgttccagtagaagaatcaagccgttcatggtctggcctccgggtctgccagacaaggaggaccaggaagcatgtctgcaagtggcaggaatattgagtgccctagtccaggcttggaccttgctggagtttttcagtttgttctgagagttcagaacaatgtgaaatactctaaatagcactccagacaataagtacttgcctagaacctgaagtctttgaacctatgctaatatgaaccttttacaagacatttaacaccatgttagggttttaagcacacttagtgtggtggctagatgccccggctggaaaaggttgctatttaagattgaacagataaaatatccaccctcgaaaattcttagtaggcatttcagtgcttcatgcgaactgagctagacactgggtagtgatcccctgcatcacacatgatttacagttcactgcttggtggagaggctgggtgggtggcagcccaagaggaaggctccagggttactgaaattcatacatgggtactttcttggactatgtacttgctagcaatccaatttaacaactcatttctaaatcccttcttggtaaaggaattcaggttacataatcaagaaaaacaaacttgttgctgcccagcaggagccaacatgttccatacctgatggcctaaggttgctaagccagcacccaagctcctgcagcagggagaaggaagggaaaatgaaggtctgtcagtttggataaagcgatgccacttagtcatcgtaacagacaataagtcccctttctggagttagcccacggtaactcaggactttgggctgccgactaagtagctcatttactgccaattagggctggatgatcattagcctattcgagccattcttttgatcggatgttctcttctggcaagcagctcactttggtctttcctagtcatcgacagtgtctttgtggcaacctttcccagcactgccctatggtcatgtgaggtaacaaatgctaccctagcattctgcatacagaggtcacttaataatttaatggaagaatgctgagactctgggtcttttcaattttttcctttcaggtgggtttggggataaaagactcaggacactgaattttaatctatgttggtgaaagggctgcacagaaacttttggctctccaaagtcaatgtcaatggaggagctgacatggtggccagacatcaacagaggttacattcctagttcagacagttgatcaggtcacaatgcttatgcctcgggtaaaacattgacctaaatttctcttttcaacacagaagtgaaacagagcaaatagtttgagccatcaggttaaagcaagcaccacctccatgtgtgaccttccctgagacggagtcacactcactgagtggagaaaccacccaccgtaggcctcccagcaggcctgcaggggctcgggtgggccgaagcaccagagctcccttctgggattcactgggaggtggcttgcagctgagggcttgaggagatcgttttgcacatcttcttaacaaccctactaggtggagaagatgaagggggctgggtgagttgctcagtgtctcgaagctggcacagaaaacggagccacgcacggctccggcacctctggtcccagctttcacaccagatggatgtgcagaaggcaggaaaagcatgttcacacaccctgaccccatgttctatgttttcttgttgcccttgctgtttggagatggggcctcgttttgcagctcaggctattattgtgggacttgctttgtaatctcattctcccatctcagcctcctgagtgctaggattacaggtgtgcactgctgtgccctccctgaatacactcacacttggtgttttcatgagaccatgcaaggaatcccttgtgcatctgaaaacagtttttgaaaaatgaaaaatgtaccgttttctggtgctagcatcccagaaatcctccctggaagaaaatacaaggaataattttataccctcatctctcagatctggtcagccagaaccacccagcagaggaaaggccaggctctttaattcttcctctgtctccagctcccaagaggaaactgtaatttccccccctttgtggtttgcttgtattcaaccttggctactgagtcttgagtaggcaaaaaagaaagttgttcatctttccctcttaccttgtctcttggacaagcttcttcttgcagataacagagcagacagcctgacgagtgtgtcacagacagtgcactgccgtgttcagcactgagccgtgtgtgatgttctctgctctgcctttctgggggccacctaggggcactggagagctgttcgtgcaggggttgttttaggcttgaaaggatgatggtgaagttggggcacactcagggggaagggacggaagtgagttatcacaagatactagagcagtgtcttctgtgtcgggaagagagggcaactagaatttaaggcaggcaaaggaattgctgtgggtctatgaaatggttaccaggattatcaccttgatgggattcattttttcagattttgttgttgttttaagttttacttatttatttaatgtgtatgggtgttttgtgtgtgtgtgtgtgtgtgtgtgtgtgtgtgtgtgtgtgtgtgtgtgcctggtgcccttggacctcctgggactggagttacagatggttatgagtcaccatgtagatgttgggaattgaagtactgtcctctggaagagcaggcagtgagtgcccttacccactgaatcatcccttcaacactcttgatggatcaagaatcaccatgggccgggtgttggtggcacaagcctttaatcccagcactcaggaggcagaggcaggtgaatctctgtgagtttgaggccagcctggtctgcagattgagttccaggatagcctccaaagctacacagggaaaccctgtcttgaaaaaaacacaaaaacaaaacaaaacaaaaaggaatcaccatggaaaatctctgcctacatctttgaggggttttattttctctttctcctactctcctgttcccatccccacttgtccccagtctatccttaaaatccattctatttttccttcccagggagatccatgtcttcctcttgttacttagcctcttgggtttatggattgtagcatgatatcctttacttaacagctaataaccacttataagtgagtacataccatgtctgtctttctgggtctgggttacctcagggtgatcttttctagttccatccaaatgcctgcaaatttcatcatgtatttattaacagccgagttaataaatggagaatactccattgtgtaaatttctttatccattctttggttgagggacatgtgggttgtttccagtttctggctataatgaataaagctgccatgaacacagttgaacaagtgtccttgtagtaggatggaatgtcctttgggtatatgctcaggagtggtatagctgtgtcttgaggtagctcaattaccaattttctgagcaaccaccatattgatttccaaactgactgtacaaatttgcactcccaccagccgtggaggagtgttccccttgtccacatccttgccagcatgggctgtcacttgtgtttttgaccttacccgttctgacgggtataagaaggaatctcagagtggttttgatttgcatttccctgatggctaaggatgttaagcatttcttaaagtgtttctgtgaggacctttccagattaggatgattgaaatcggaatacctctctgaatgtggctgacataatttcatgagttggggccctagactgaataaggacagtgtactaactgccaggattcacttctctcccgacactgctgcatatgtcacctctgtccaaaacaaccaagtgacaaactctagagtgcccttagtctaagtttgccttttcttttttgtgactaccagccttgcggagggtggggatgctggtgttcatttgcatgttctgagtgctcttcgtctgctttactaaaataaggaaacccatacttaatgtttcagtgggttttcatttttgtttttgactcctaagaaggttgctccctgtaaaaactttgacaaactttactaaaaagtaaacagctgtagattgaccctaccccatgtgggccagaactaaagcacatgtttaacctacactcacacacgattccgcattcacgaaattcctcgtttctcacagtgacgctagcgccacctccaggcgtgctggcagccggcacgttcttggtcttccacaccaccagccgcagatcgccactgttcgataccctagatggccactagaggcagcagcaacaaacttgtcctacatcgcttgggaccagttttgagttttctcaagccctccgtacgtggtcacatttcatcagccaatatgctgcgtgtgatccttaaaatggagacataagggactgggaagatgtctcagtgggtaaagtgctcatgcatgaaaccccaagctgggatccccagcacccataaaaaatctgagtagggtagtgcctgtaaccctagagggggtggagacaggagggtcctggagcccactcactggcaagtcagtctagccaacatgtgtgctccatgctcagtaagagagaccctgtctcaaaaacaagatggcacatgataaaggaagacactcacatgaatacacaaacacacacacacacacacacacacacacacacacacacacacacggacacggacacggacacggagagacacacaggggcactcacacagacacacagacatagacacacacacacacacacacacacacacacacacgtgtgcagacacacagagacacacacacaggggtgcagacacacacacagacatacagggacactcacacagacacacaaacatagacacatacacacacacacaggtgtgcagacacacacacagacatacagggacactcacacagacacacagacatagacatacacatgggtgcaggcacacacagagagaggcatacaggggcactcacacagacatacacacatagacacacacacacacacacacacacacacacacgggtgcagacacatacacagagacacacggggcactcagacacacacagaaatgcagacagacagacagacagacacacacacacacacacacacacacacacacacacacacacactagtcatgcatatacataaaatccttaaaaagaaaaaggaagtgttagttgaccaaggaaagttcgaagaggtaatgagtgatcactgctggttcagatttaaccacgtgttcgatgtgaaactctgttgaatgtgtattccacactaccaaagaaggccgtggtagaatgccgaaagtggaaagtcaaggcaggaacttgaggcaggaactgaagcagagactgtggggacctgcgatttcctggcctgctcccctgccttgctctgtctgctttcttatagcacccaggaccacctctaccaaaggatggcagtgttcccagtgctctgtcccacccatcaatatttaatcaatatgagcaggccagtttgatggaggccctttctcaactgaggtttcctcttgccagatgaccctagcttttgtcaagttgacaataaaacaaaacaacaatgataagaacctaaacatcacaccaaccaatcaatcaaacaaagctcatttggggccagtagtctgagttcccatcagccagagaggaaagagagcactgaatacattggggaattcagtaggagctccagaaggaatatgacttagaaacagcctaaatgaccacaggaaaaagcctacctcagattcttcctcctaaagctgagtgacttacaaaatgctctcttatcatatgggataaattcacatatgatgtcctttcaagcaacaccacgaaatacaaagcgtaaaaatctacagcccttggtgtccaatcaaaaacctccatccacaggcagaaccaggaaatgtgagtcacaactgaggggggctaagccagtaagacagcatcagaaacgagaaaggagttgaagaatttctccagtcagaaggaaaaacagactgaaggaatatggactagtttgccagaagtggtaagtgctttggttactagaacagtcttaagtcaggttttctattgctgtaaagaggaaccatgaccatggtaactcataaaggaaaacatttaactggggctgtcttgtaggttcaaaggtttagtccattgttgtcatagtgggaagcatggtggcagatatgatgctggagcctgagagttctacatctgtatctgcaggaaggagaggagagagagagagagagagagagagagagagagagagagagagagagagagagagagagactaggcctgccttgagcatttggaacttcaaagcccacccctagtgacacacttcctccaacaaggacaccttgtgtttttgtgtgggttctggaggtccagtacaggtccccaggcttgctaggcatgcatttttgctgactgagccatccccttaaattcccatcctggtttttgagattcttgttttccctgtgaagcccaggatggccttgaattttctatgtagttcaggctgccttcactttccctgcctcaactcataaatgctaggattacaggcacacaccactatatttggctacacaaaatggttcttaaaaagatcaataaattaaagctgcattgaagactagctaacaagtacatagaccaacagagaattgtaactacatttttttgtttgttttttgtttgtttgtttgtttttggttttttgagacagggtttctctgtggctttggaggctctcctggaactagctcttgtagaccaggctggtctcgaactcacagagatctgcctgcctctgctgggattaaaggcgtgtgtcaccaacgcccggctgtaactacgttctttaaaaccattcaaaggatggtaacagaaaactttggaaagctatttactaatagttttgatgacttaagccaagtagaaaaacaaaaagaaaattttcttttcatttttttaaaaagatttatttattatgtatacagtgttctgtctgcatatatttctgcagtccagaagagagtaccagacttcattacagatggttgtgagctaccctgtggttgctgggaattgaactgagaatctttggaagtacagccagtgctcttaatcactgagccttctcttcagcccctagaaaaatttctttaaagaaacaaattatcatcttactcctgtcagagtggctaaaatcaaaaacaccaatgacagtttatgctggagaggatgtggagaaaggggaacacccctccactgctggtgggagtgccaacttgtacagccactttggaaatcagtttggtgactcctcaggaaaatgggaatcagtctaccacaagatccagcaattccactcctaggcatatacccaaaagaagcacattcatacaacaaggacatctgttcaacaatgttcatagcaacactatttgtaatagccagaacctggaagcatcctagaagcccctcaactgaagaatggatagagaaaatgtggtacatttacacaatggagtactactcagcagaaaaaaaaacaatggaatcttgaaatttgcaggaaaatggatggaactagaagaaaccattctgagcaagtaacccagtcacaaaaagacaaacatcgtatgtattcactcatatgtggattttagacatagagtaaaggattaccagcctacaagccacactgccagagaagctaggaaagaaggaggaccctaagagatacatacatggtcccctggagaaggggaaagaagggtcaagatcccctgagcaaattgggagaaagggaggaggggggagggagctaggagaatgagaaggggagaagaggaggggtgaggaggacatgagggagcagaaaggttgagtcaggggaagaatagaagaaaacaagaaaggagataccctaatagagggagacgttttaggtttacagagaaatcaggcagtagggaaatgtccgtagatctacaaagatgacaccagctaacaatctaagcaacagaggctaccttaagtgccctcccctgataatgatattgatgactgacttatatgccatcctatagccttcatccagcggctggtggaagtagaagcagatacccacaactaatcaccgaactgaactggaatccagatgcagagaaggacgagtgaagagcaaaggggtccagaccaggctggtgaaacccacagaaacagctgacctgaacaatggggagctcttggtccccagactgatagctggggaaccagcatgggactgatccagaccccaggaacgtgggtttcagtgaggagaccttggaagtctatgggacctcctgtaatagttcagtacttatccctagtctacacatagaggaatactccctgagccaagacacaccgtggggggtgggcccaggccctatctcaaaggatacaatggactccgatgactacctatggaaggcctcaccctccaggggcagcagaaaggataggtgataggtagggttttagttggggtgggggtggtaggtgaggaagggaggcagagggaactgggattgtcatgtaaaacaatcttgtttctaatttaaataaaaaagtcagcaaaaaaagaaacaaattatcagactgaactaaaactagaaaaataaaatctttagccaatacaaatttaactactaatttaaagcatccccagagaaaaccgtaggcttaagtattaaggcacaaataatggaaattctacagaaactcagagatgagcagaaaattatttctcaactaattttaccaggtagattaagttattatcatgagacaaagaagaaaacataaaagacctaggaaatttttaaaatggtttttaaatcagaaacaacataatctctcatgaatggatagaccatttttatatctatgcaaagaataagtgctaaggaataaaagaattccccaaaattatggacaataatgatgtgtatacaagatgctgagagaaacagattttaagaagaacaccctggggggctggagagatggctcagtggttaagagcactggctgctcttccagaggacccgggttttgattcccaggacccacatggtagctcacaactgtctgtaactacagttccaggagatctgacaccttcacgctaatgcacataaaataaataagttaaataaatttaaaaagtacacccagtgtaattccagtcttatgaaacaaaagagatgcactgtaaattgttacttgctgaccaaccaagtcagtggctggctctgggagctggggactggacagctgggaaagggaacatggatccctgtcgtgtcaaaaaacgtgttatgactttagaagtggtttatagaggtgtcaaaattcattgcacctcagagttaaaaatgtatactttatgtaaatttatggcaatagaagatcttgatgtgcaggagggttatgacacaacaaagtgtgttgttaagagaaacaactaaaacatatagatgcaaagaagtcggaaatgagatggaaaaatatattctacccaatactaacaattggttctaaataaaacccaaataaacaaaccgaaatcaccaccatcacccagccggggtggctttcttgtggcactgacaacagtggaggagagaatcacatgaccatatgggaagatgtgttcatcagaaaatgttctaagtcaagacgctgctgaaagaaaccgtttggcccccatgattcagagagggagagatggctttctataaaagcacttttgattagaaggtgtgtaacaagtatcctaatgagcccaaaagagaaatagaactcgagcagagatgccatgagagagcaggtgcatgcatgttttgtctgcatgtatgtctgtgcatattcgatgcctgtagagacagagaaggtgccagatttccctgaaactagagatacacaaggctgtgtatagtaggaaattaccaatacggagtcaggtagaaatataagggtatttaatagggaaaagccttacttacagagcgaaccagccagccggtggtagtctgtacagcaagaagcaaaaagagaaaccgaaacgcagtccccctactcactctgaccacgccctcacaagccctcaggtactcctgtagccagcccctaagaaggcgtggctacagcttcccctacagctgtgagctaccatgtaggtgctcctgaacccaggtcctctgcaagagcagccagtgctcttaactgctgagccaccctccaatcccaagaatatttacttttaaaggcaaatatgtagtcatcctgcatcattgagaaagggaactcctgagaaaactgtgttacatcactcaagttgaacctggcagaatgagaaacatttcctgtggctgtttgggtgacaggaaatttgatgtgtgacatcttacatgagatgagttctgctcctaagggtgggcatgaaggtgtagtcagaggaggttggagaaattctaaaatttggagcaagttttggggagtggtatggtggcggagttactagtcacatcttgggacttctttccttcggcatgcacagccgagctcctaagaaagatgagagcaactgtgtgggtgcatgtacacatctgggagacagaacgaagggcaatggcgagggtttggatggcagatgctgcagtttaagctggaaaaggaaagatgggaaggctaacaggcactgagtcatagaaagtaaggtggtagatgaatggtcctcagacggagacctggatcactgacacacgggactgacaatgagaaaagcaaggagacaaaagcagactgtcaaaggacacattgtttagctggatggggcccatctttaaacttccagtactcgaaataaccaaacaactgaagacaaggaatattacaaaaacatctagaataatcacattacacagcttccttgtatgagaaaatgatttttaattgcttattataaaatatggcacaaggcttggctaaacagtggtaatttgacagtcatctgctaattaatagtttgcactcaaactttaaaaatcctgtattttttttagttctgttttctaagataaatagtaacagaattattatcctgagaaccagtggaacaaggaaagtgtaggaccagccccttccccagactgcactcttttttttttggttttttcgagacagggtttctctgtgtagctttggagcctatcctggcactcgctctggagaccaggctggtctcgaactcacagagatccacctacctctgcctcccgaatgctgggattaaaggcatgtgccatcaacgcccggccagactgcacttttatccccaaagatgatctggcttacaaactactatgtgcaaaggcactagggagttttaactgtggtggcaaagataaattgggttttattcgaaaggaacttttgaatatgatcttggggaacaatctaagacatggcaaaaatccccaaagtgaaattttaaaactaaactctaagaaagatccaggaaacaaataagagaggttgggaataggctggttgtcttagtcagggagactatggctatgatgaaacaccatgaccaaagaaacctggggagaaaagggtttgtgtggcttgtatttccacatcactgttcaccactgaaggaagttagggcaggaactcaagcagggctggcggcaggaactcaagcagggctggaggcaggagcgatgcagtggccacggacgggtgctgcttactggcttgctcttcatggcttgctcagcctgcttttttttcatttcagattctatttttttattaggaagaaaattattttacatgtcaatcccaggtccctctccttcccactttaccccccccccaactaatgccctacctatcccataccctttctgctccccagggagggtgaggccttccatagccagtcttcaaagtctgtcataatctgtgggatagggcctaggccaacccccttgtgtctaggctcagggagtctccctccatgtgagatgggctcctaaagtccattcctatgctagtgataagtactgatctactacatggggccccatagatttccaaggtctcctcactgacacccacattcagggggtctggatcaggcccatgctggtttcccagctatcagtctgtcagcctactttctttctttcctttctttctttttttggtttttcgagacagggtttctctgtgtggctttggagcctatcctggcactcactctggagaccaggctggcctcgaactcacagagatccccctgcctctgcctcccgaatgctgggattaaaggcgtgtgccaccaatgccaggcccagcctgctttcataagagaacccagggctaccagcctagggatggcaccacctgcaatggactgggccctgggcatcagtcactaattaagaaaatgccctacagctggatctcatgggggcattttctcaattgttgctccctcttttcagataactctagcttgtgtcaggctgacataagccagcatggcagttttaggaagaaagctgtgtttgtactgggtactgaaggatcagcatgatttcagtgaaaagggaagcaggttcagactaagctgcaggaataatctaatgacaggcaaaggggtcagaggaagtttggaatttattgagaggacgcaccaacttcccaattcctagtttgttcctgcctttagaggcttatgtgttgggggtttatggatctcacctgtccccgaggacttaacagataagggctgatgagggaagactagtgagaaacaaaactctagtctgtttacccacgctcctgtaagcagccctaatgaaatccaatgacacatcacacaacacacacacacacacagaggtctggctggaaagaggaataggttttagggtagaggagacatacatatccatatatgaaaatgtaacaatgaaaagtactatgtgtaattgatacgtacatagggcattaaatgcttgttttttgaatagggaaggaacactctctgtctctttctctctctcacacacacacaaacctgggcttcataaaaacggttggagtacattcaatttcgaagagtcttgtgaatatctgagtctgatgggaaaaccttcccctcaattctcacccagctaaggagtcatcttcaggttgaaaacagtgagattttgcccgcacgtctagagtcagtttcagattattttgtcagtctgtgcgtcagttcggttatcttttaattttttgcaccgggaccacgtatgtctagaaccccggctggcctgtctcgcgctgtggagcccaggctgctccaaacgccatcctcggggcggggcggggcggggcggctacagcgggtgctcgcccgccgactcggcttccccgccaacttttacacagcgacgctcgcctcacagagccgcgccggggtctcggtccttccggtagcgcgtgagcggccgcccccaccccgcctcctgctcctcagctcgcccagcgcggtgctcagggccggccgcggttcaaagccgccgccgcccgccggccggccgctcgcagcacgcggcgcccgtctccaggcaacgccagcgcatcggggtctgcgcagcgcgcgcgcggtggccgcggcggccacggcttgttttttcaacagccgtccgaaggagccaatcggaggcggctcgccgggcgcacgggcgcggattgggcggaagcgtctcccggtggccaataggcgtggaggcgggcggggcgggaccggaagccggcgaggggaagggggcggcggccgcgggcagtttgaacgacgccgggctacggggcggtgaggagcggctgccgcgtgcggagcgcggcgcgcggggaggcgagcgggcgagcgggcctggagccgggttctgtgagggacgcaggtgagcagcggcccccgccccgagccccatccgccgccctctctcacggcttccagaagcttcgccgtcgctcggcagcgggaggggtggacgctgacggaggaccggggagcgaggctgtccgcgccccttccgggacgcgttcccgtcccctccccacaaccccagacacggtcacctctcccggcgctgcttcacacccggtgtgagcgcctgagagaaccgctgtggtggacggctcccctccagagggtcgccgccctccgcccgccccgaccgcctcagccctttactctttcccgtttcccatttgttggcttcacgtcttttgctccggggatccgcgttagctaaattggtcgacaccggacgacagttagggggtcccgtggaaaaggacgtgtgcgtgcttgcgtgcgtctctgtgtgcgtgtctgtctgcacacaagtgttatgtagctggctggctgttggccgaattttgagttagaaaagcaacctgctggtttcccttgctcgtttttcatttctgccccatcactttatttatttatttatttatttatttatttattcattcactcatcaatttatttattcatttatttcccctctcttttaagtcgggcacaccgtcgtttattgatggatgtacgtatgtatgtctgtatttccgctctcttcaagatgggttttctctgtgtagtcctggctgtcctgaaactatctctgaggaccaggctggccttgaactcggctgtttctctgtctcctgactgttggggttaaaggcttgcctcccccccctccatggctgtggcatctttgaatgattttggcatctggctgagttgttaagcagttagtgtgtgatttttggtgtattgtcctttgttccttgagaggccatattcctttcagcagctactgtgagaatttggtggtggagttactgacgtcgtcttctgagacctgggagaaaaacagtgaagctggcagcaaaaatagttttcaaggctggatacctaacatgtcagggtacttgtttaacttttgaaaatatttttttttttttcaaaatatttacagttagatacagtctcagcatacatacgcagcggtggctcagaaggcagtaatccgaacttccttttttagcataggctgaagtatatctggggaaactgacacaacggttaccatgcacataaaatgtactaggagatgcagttttgatgctccaggaaggtgctgcctttttataaatgagagaccctggaggcaaagaacagttgaatggtttgcccaaggttgtgttactaagtaacagtgggagggctgaaatgtgctttgagtccctgtctgtgctcttgtttctttttcatctggagtgtgcctttaccacctatgacgtggtcctggtcataacctggcatccactctctgctgatgcatgtgtgaacctaaccgataacatcgtggaagcagctaggtccctcgtgagagcctgactggagactgcaccctgtttagggcttgcagaaaaggcctccttgaggatgtaaagtatgaggggggatgatgtgaagaagtggaagagaatgtgtaaaataatgtcattcttctctttcgaataggcaggatctgttttacatgttttatataaagcaagtagttataagagctgaaaactggaaaataaatgaggagaaaaccaaattgttaggcatttgtattggcctgcccttggggttctgacaggatgcacacatatactacattgttcccttttaaaagggccctactcattccctccctccctctcctgtttctctctctcccctaccccttctctgcctctcttttctgtattgctgctcctgtccccagaggctgacctctgcctcccctccccccttttcccatttatttcccctaaataagaaacccctccacccaagctctgtcacatggcatctttctcttgagcgctgctttttgcattacaacacaaataagtatgctatataatcagagtttcctcttctgactttattcttttcaggttacttacaaatgcttgaaaaataaaacaaaatgagctgggcactggaagaatggaaggaaggtctccctactcgagcccttcagaaaattcaagagcttgaaggacagctggacaaactgaagaaagaaaagcagcagaggcagtttcagcttgactctctggaagctgcactgcagaagcagaagcaaaaggtaccactttctgaagcagtgtgcttccttttggattagttcacttgtagaaaaggaatcttgtctctcactcagacatttgaagttgcctcaggttttattcatctgtggttttattgctgctcacctgctgatcattagggcttaatttcattttaacttctgtttgggaaatggcttttttgccaggtgcaataaggccaagtatgtggcttcagatctggactggtatggcgttttttacgctttagatggagagaactctctctgacagctttttactttggagtttccaacatcatctcttcaggggtattaaatgaaaacgtaatacttctttaaaaacaaaacaacctgttaaccaactgtgtggtggtacaatcatggcatctaatttatttttgcttatggaaggattttttttcccatttcttaaaataactggcttccttggtgaaacttgaaagtgaactgttcaggaaaacttataaggtttatttttaaattctctttaaaattttgtgtgtgtgtgtgtgtgtgtgtgtgcgcacatgcgcgcctgcctgcctgcctgcctgcctgcctgcctgcctgcctggctgattatatgtacaacccattagtgtaggtccaagagctcagaaagggaagttggatcccatagaatgggatttgtagacagttgtgagccatggaatgtgggttctggaaactgaacccaggtccttatcagagcaggaaattgctcttatccattgagccatcactccagccctttattttcaattcttgaaaggacatcaaaaaatagtatcgtatgtgactttatagaactttatacgctcaggtttgcccatttaaaatgtctctgtttggccgggtgttggtggtgctgactttaatcccagcactctagaggtagaggcaggtggatctctgagttcaaggccagcttggtctaccaagcaagtgccaggataggctccaaagcaatacagagaaaccctgtctcgaaaaaccaaaaaattaaaaaagtctctgttcatgaagcatcacaccccacccccaccctggggtgtgttgttactaccatgtcccacaaagttagttgtagagtcagacttacacggaatacttggtaagtatataacaaaactattttcttgtcaccaatctctgttaggttgaagatggaaaaacagagggtgcagacctgaaaagggaaaatcaaagactgatggaaatatgtgaaaatttggagaaagcgaagcagaaggtttctcatgaacttcaggttaaagagtcgaaagtgaattttcaagaaggtcaactgagctcatgcaaaaaacaaatagaaaaactggaacaggaacttaagcggtaactgagtaacatttgtatggacttcagtgccaaggatctcagacccccagctgagagcctggccaaaggctgaggaatagtaacttctaggctcacataagagttattaaaacttgcagggataagggtcccagtatacagaaagaccaacactaggtggcatcttttgccaactactcggggaaactaaagtagccagagaccgtcacttgccttgctttctgtctaggtggagcagaagagcccctaatgtggttgggtagcatttctagccacaatcctttctagatgtgtaatgttaatttaatttgttcatctctttttaaaatgccatataatgtctgtatatcgagtctctaaattttttattacatttatttgtgtgctcatgcacacatggaagtcattggacaacttttgggagtcaattctccccttctacttatgggtcttgagatcaaacttgggttgtctggcttgtcagcaaatgcctttacctgctgagtcaacctgctcaccccaagtctcttgttttaacatgattatcataagtaatgtctctgttttcatagttagaacctgtacttctgaagttctgagctcttttgtatttactttggcttagatggaacataagatttgcttggaatgcagccccagtcttctaaacctctttgctgctatggtgctttatagtactaggtcttcataatattttgaagacagggtactacattttacatatggcttaaaaactaagctcactagatgtctattggataaaaggattcttagaggcaaagttttcatatgctcttttgttctctaggaatgtatagcattggtactctgtagcctttgttgtaatctgtcttgttggtctcttgggttctttttttaacaggtgtaaatctgaacttgaaagaagccaccaagccatacagtctatggatgtttctctgaatccatgcagtacaccccaaaaactttttacaactccactcacaccaagtcagtgttatattggtaaagatttttatttgttataaacaagttttgagttttgaattctgcaagagcaatggattagtccacatttgaatttagcttttaattttggtgtttcaaaaatgtcatccccaattgcatgtttgttgaattatgttgagggatacccttctgcagtgtgttttaaaagtttcagaacatgagagaaacgagaggaacctcaattttgaggaatttggtcagtattttggcatgttgcttcagtcttctttctatttaaatgcttatttcgagatttatttagtgtagtcattgctgatctgttcattcatttccgaaatgattagttcacataaactcttatttgattgtctgtgtttaggttccacatatgaagatctaaaagaaaaatataataaagaagttgaagaacggaaaaaattagaggcagagattaaagctttgcatgctaaagtaagttcaatgtggtccctgcagaagacgttcagtctgtagagctctttgctgtagcagaagaagagtggtgtagggctggcgtatttctcttacgtggagaagaatttcagggatcactggtagtgattatttttgtttgttttaaaacggtcagcaagatggctcatcaggtcaaagcacttgctgtcccaacctgactacctgaattcaatcagtggagaaccccataggggaaggagaaaactggctcctgaaagttaccctttgacctgcatgcaggtgctgcaatatatatgttcctgtacgcacttccctattacacaaataaaattaaaatagataggagaaagctgggcattgtggaatatgcttgtaatctcagcactcaggagactgaggcagaaagaaggctcttgagttccaggccttcctgacctacatgtttaagaccttgtcctaaaacaaaaactaaagacactaggtgaggttagttttatctccaagtattaaatgttcatgagtgcaccaaatccattttaccttgttaaaaccaagattagggaccctatttagagagagaaggacttgggaattactcctttgtcctgatacttgctggctgacttccctggtggaatgtggttactataagaactgagttttgagggtcattactggtaaaattctcatttcagggaagaatgttggcaacacagtgttctgtttttttttttttaagatagttgcccgtaggttttttggtttgtttgttttgtgttttgagacagtctcctgtctgagactggcctcaaacttatcaagtagctgaggaggattgccttgaagatctgaacctcctgccttacttgcagagtgttaggaccacaggtgtgtgccgctaaactcggtttgtgttgtattgtgggtagaatgtagggcttcatgtatgctgagcactctaccaactgtgctacacctttagctataaactccattttattatgggtcagtaagcagggaagtgggtgaaaagtcaggatttcaaaacccttacaacttcagaggccaccctcaaaaacctgatctggaagagtccattgccattgctgtgcacgttgtttcattttctgaaacaagaacaacaaaagcccccaaacaaaacctagttgggtatcaatgtacattactgccaaacagaaatttgagaggtcacaattcaaacaacttaaggcagaatttataagtaggtaactaaatattgaggatcgaaaggtaccccttccttccttccttccttccttccttccttccttccttccttccttccttcctccctccctccctccctccctccctccctccttccctccctcctccctcccttcccttccctttcttccttgcttccttcctcctttcttcctttctttttttttttcaagacagggtttctctgtgtagctttggaggctgtcctggaactcgctcttgtagaccaggttggtctcggaactcacagagatccacctgtctctacctcctgagtgctgggattaaaggcatgccgcgatacctatttctttacacatccttcaacagtgttttaaggtcaccaggattgttgtaccaaggcactgctttccaagataaataaaactaaattctctaacctgtcctagagaaatgtgctgcttcattggtatgttctgctcctataaggagtgtgaatttctatagccattgacccactccagtagtcagaggagtgcttgttatgacagtaacatgcatctgtctccacaggctacaagtacttgttgatgtttctggggtgcattagcagataatgaaatgtgagattagtgacagttctataggttgatacttaatgtaaaggtttctggggaaaggaaagccaagtttggaatttaaaatggaggtgaataatggtaagtagtaccaagatttagcccttgtggattgatggtacctcagatggcattagttctctttcgcccttcagtgctgagaggtctgattgttaggactttgccctgctaggtcttggaatttatgatatcctaccctggattagcgttcagtatttgctgtgcaagctccatcatcatgggattatggcttcatgttctgtctggaaagaagaaatagccctgaatattgagatttccaggtttgggcatgtgggtcagcagtaatgtgattacagaacactggggagacagggagagataaagaaattgagttatttttaagagggctgtaaagagtttctatttctacagaacgtgagccagcctgttccccaagccaccatgaaccaccgggacattgcaagacatcaggcatcctcatcagtattttcttggcaacaggaaaagaccccaagccacctttcatctagttctctgaaaactccacttaggagagatgtctccgcttctcatttttggggagaagaagtgactcctaacagatcaagtctgcaaacagggaaaagagactgcagtagcagcttttgtgacgatcccagtagttctcagcttttggaacaggtcaaggcccagaatcagggtaactttaacataacttaagtttaaatggaggttttcctcagtctgggatgtgcattgtatattttgttagacacattggtagtttactccccagactaatgtggtccatttctgtaatgacaaaagaatgacagttttggaatgcacttgtatttgtattgaaaatgtggcactgtgagtctttaaaagtagactgagaggctctgacttattttttaaaaagcagaatgagtaggttggttacaagtttgcactcttcattgcttcttagttggctctgttgaggcccttagaacaagcctgtggtctgagaagccttggccagaggtgtggtgtgtatatgcaaaagagctcttccctgtgctgccaggctgtccatatgggagcaaacctgtaaccttggctgctgtaccacactgaagctgacagccaagcataccaggtggtgttttggaatccactctgtggactatgataatttccagtgctgtgatatattgagaatcgtcatcagtgtttgctggtgagagttgtcgcactgccaatgccattggaactagtattgcttatgcaggaaaagggagggataacattgttaattttggcactatgtgaggtttacactgtcttgatcttcagtggaggcaaagcttccaggcactgtaggaaggtgagtatcccacagcctagcatgaatttgtattgatatgggcataaagcaaatattaatgtccagtgtctaaagtcaagtgataactacacagggcattgcttgtggtcagcactataccaccataaggtgctgcttgcaaagcatcctccttttgctcctctttgaagacataagaaaatatatttctctgccttccgtgggttatttaaataagcatgtcaatggagatgctgactgttgaagttaaatccaattaacatagtttctgtatttaatgtttattagagttatctcaccaaagattcagagtaggtaaaataaataagttgtgaacattatgtatatgtgtgtcttgatataaattagaatgttcttttcttttgtgctttcagacctaaaaagcaagatgaatgagttggaactacgcctacaaggacaagaaaaggaaatgaaaggccaagtgaataaatttcaagagttacaactactgttggagaaaacaaaaatggaattaactgaaaaagagaaagttttgaacaaaaccagggatgagctagtgagaacctcagcacagtgcgaccaggcagcagccaaggtacttgacttcccatgaatgattgagaaatttataaagtagttgtgggtaaaggtctttgaaagcccatgctgtctgcagaggggtagataatgggacctgtcttgcaagtgcctttccagctgtcacagtcaagaatgttttggcactcaagtggcataggaggattactgcagctggaggggatagttcaggacacaggatggcatttaggtgatctgcccctggactcagtagatacatgctgccaaagacttttcttaagtgaggtcattatttgagggcttgtttctttagctcaaacctacctcaggtttttctgtttttttttttctgtcatttgtcttcactaatgtactctgtcattcacttggttatttactgagtgttgctgcatgttattctagtcctggggatatgtagagcagcaaaaattattaccctgtggaggcagagtataatagcagtaaaataaatccagaaaatagtataataagtaatattaaaaaaaaaataaagcaaacaaccgattactatgtggtaacatggagaagtgaattaccttccaaaaccaaccatggtgtatttggtgctttctgtacccaatctctctgggcccatctcattctattttaaatacccactttccctccaatttatgttttttcttgccatttactctcttctggcatcttcctcagggcccttctggtgtcattattatgttctaggcatagggttctttcacttggctattagaattacagagatcctcgaaaaaccgtgtctgaggtgtccctgaggattttttttctttaataaacaccatttctgaatctataggtgaaaattgttgcattcgaactgggtctctgctttccatgggcaggttcctttttcttccctaattaaaattttgtttaaagtcattgaaggttcacatttagctgtatgcagcagtagcttactaatgtggctgattatactgactggttttcagatactcacatggaaaaagccccacatgattatggcatgtaactttttacttacatgtgaattttatttgccaataacttgttaaggattggggtgtcttattttcatgagaggtatttattgtttggcattttctttttttcttccatcttcatatgatacttgttatcagggtaatcttggattcataaaatgaactgggaactgttctatcctttttctggaagaaaatgccattgatgtatctttctttatggattgagtagaattcccttgtgaaataaaccaggcctagagatttttttcatggaaattttgatattttaaattcagtttctttaataacttaacaaaattatttgtttcctactgaggggattacagtggttgatgtttttatctgagtggtcaaatttctgtatttctgtcttcctaatttcattctacctatgttgtctttgatgtatgttttgcatacaattgggtcgcctactgtttaattggtgaatttagctcatttatatttaatgttattatttgccatacttaagccttcgacttttattttgctttctgtttttttttttttattgaaacatgtttcttaccttttagtggattacataaacattttataggattcataggctattgtatatttattttgccagcattaatatgacacatttgcctcccttgtttatattctcccccatttatagtcgtcttaaatggctttttaacttacacttggaactatattggctgtattacattttttatgaaattgtcagacacttaaaaatgtcagatgaatgctttcttcccttctaaattctggcagggttcctttttgatctttacctttctccttaaagtgcttcctgttccattgttagggtgtgtttgttgtccacaaggtcttagtttccctttatttaaagatgtgtttatccctcttcattcctgaagggtatttctgggttgagatttgtttgttcattttgttttgttttctctccagtatttttgatatttatagactctcaaacactcattagtctgcttcctctttctagtcattgtttatttcaaagtaatgttcagaaactgtatttgttgctgttgaggtaagactgtattctcttttccttttttgaagtaatattattacttaaaatactgttgtgctaaggtttgtaaagattgaggtgatttttgtaaaaggtttggcttaatacctgggtcaaggtgaatttataatattaattgctgttatcagcgcttattatttattgagtttgtattcaactctgctaattttgagttgaatctctgtgtagccaggacttcctataataacaatatttatcttgttttggtgattaaggatctttgttctacttgtcatatttggtgaggtctctaatgagattattgttagaggttatgacttggagagtgctaagactctgactctagctttcatctttctactaatcctccaggtccttaagattcagttttatttcagtaccttttggattctcctttctccccaactcagtttcaaatctgcccaactgaaaattcagtgattttttttttttccttgtgcctaatagaattttgttaaacattgtgctgacatcatattatgttgtgtgtcattagaattgcttattatggagctaatacactcttgtgttctcaagtgattggatgttgtttgagtctttttccaagtatttacaaactatatttggaggctgaaaggaatttaagactgacagcaactaacctggtacccatcacccatgctttacaattgaaaaacaaagctgaagggagtgctcagggtcataaactaaatagttacaggaatttgagtcttgtgcactttagagcagtggttcttaattggtgggtcacgatccctgggtggtgaatgaccacttcacaggtgacatgtcaggtatcctgcatatcagatacttaaaattcataacagtagcaaaattacagtaatgaagtagcaacaaaataactttgtgactgggggtcatcacaatataaagaactgtattaaagggtctcagcatttaaggttgagaaccactgctttagagtattatagagcatacatgacatctagtgggcagttacttacacatggtaattttgcatcattggtaatacagtggtattcagaatatttttgaatgaagtataaataccttcaagggtctgttgtaatctctgctgtctataaggaaaggtcccttaagaatatgctgcactgtgaaggagtgccagtagagggtaccaagggtttgtttacgctagtgcttggtttttgtttttgctgtttgatattgccagctatccaaatgccaggcttagggctgatgatctcagtagtttttacatagcctagcacagtggaagacacagtaggctctcaatcactgtaagttaaatttatatttattgttaaaaatcttgtagtagtattcctagggaattgaaaaccttagacaataattatagcagtgaaggtatcttcatgtctgaggcagtgggtgaatttgatgccctggagaaatggatcagttggtaaaatgcttgctgcagacctgagtggattcccagacccaagtaaaaagctaggcattcatctgtatacatagagcacacgcatgtgaagcagttaattttttttgtttaggaagtgttttgtttctccatgtagatcagactgacttcaaactgatgattttcctgtctcagccttctgaatgctgagactacaggtatgtgctgttgtgtacagcttaggctctcttctattgaccagtttggtactgttcgtctttggttagttaatagtctttggttagttaataatcaacattttgtcttccagcaaatattgtatagtgttttcttctgaattctcagattctagtacagtactgttaaattagactatggatggctgaacagacagcctaagcactggagttcagtctgttaagtaagtcatgcttaaattacatgtgtccgtaatacttatgcagacaggatctgtgactttactcagcaggaacaggtagttgctgcagacacctgatgacctgagtttagtccccagaacccatggtaggaggagaaaactgactcccaaaagctgttttgttggcctgtgtgcatgtgttgtgctcccccatcatatatgtactcacaataattaaaaatagctggttgtagttgtatgttgttgtaatcctagcactgggggtgggttggggagagcagggcagagacagaaggatctctggtgctggctggctaggctgtctagcccagttggtgaactcttccagtgtcagtgagagattctgcctaacgagaatcattgaggaagctctggtccccatgtgcacctacctgcaaatgtgtaccttcacacactcatgtacaccgtgtgcatgcacacacaaacatgtatgtgtaggaagaatttcagagaaaaataatgaagtttactaaatcgaggcacctctcagagtggagaaccctttccgattaatataaaactttttcccccaatgatttattttatgtacattgctgttttgcttgcatatatatctgtgtgaagatgtcagatcccctggaactatagttacagacagttgtgagctgctgtgtaggtgctgggaatttaatctgagtcctctggaagactggtcagtgcttataaccgctgagtcatctctccagcccccacaaaactttatttcttcttcagtattgtttctgggagtcagccattttaaggatttgaactaaaggaatggcttcaagatatgcaatgaatctcaccacttgaaaggactaaaataattttgtttaaatttaactttaggaaaataccctaagttttcatgtaattaatatttttaaaattagcactaaactatatatatgttaaaaaaaaaaagcaacagcatattctttctgttgcttctgagagcataatttaagaacagctgtggttttctgggattctgtgaacctctagaaatgtaatgatataatgggagtattatggaaagaagtagtttatttttaacattttttaacaataattcattatggactgggtatggtggtgcctgcctttaacccagtaccagaagggtagaggatggcagatcctgagtttgaggccaatcttgtaagtttctggccagccaggactacttacttagaccctgactcaaaattatctgtctctactgtgcttgcaagatactttgatgaggagggtagggagcccgctctaactattctatagctcataaatcactatgccagtatcactgccttgtttacttactagtgttttatgtgaagtaggttggaggacaactttcagcctgtctgaacaagaatttctgggcatctctcatgtctccttccccatcttgccatgggattcctgggctgacagatgcaaaccctcccattcagctatctgtgtgggttctggggattgaagtctaactgtcagcctcatgctgccttttggtgcctgtttgccaagcagtctccctctaccagggcacacattgtgaagtatgttagagacgtactgatgcttaacatccctattcacatttgctaacagatcaatcatagtgaccttagagtttagataatgatataaacctggcctccccccccccccacagggtttctctgtagctttgaagcctgtcctagaacttgctctgtagaccaggttggcccccttacttacagagatccacctgcctctgcctcctgagtgctgggattaaaggtatgtgccaccactgcctggctctaaacctgactttttaaatgatataaagagatcaaaacaatggtaaacatgaaatagactttagggactacgatttctttttttgtttgtttttgtttttttgaaaacagtgccttactgtgcagctttggctggtctggaactaaggaagtagaccatactgaccttgaactcagagatctgcctgcctctgcctcctcactgctgggtttcaaggtatggatcatcatactggcctagactaaaatttcttaaaacacaaaatttgggttctttctttgagtaacttgttttatatggaacatttttatctgttatcagtgtattaccttggaacaaaagctaaaaaatttgactgaggagttgagttgtcagcgacagaatgcagagagtgccagatgttctctggagcagaagattaaggagaaagaaaaggagcttcaagaggtaaggtgaatgggttcatggagaacttttctgagaaagactagtgatgtggaaggaagaactacttactgtgactgaggacattatggagcaggcatgctttctgagcacaaggcccctgcatttttcctcacacctgcattcttgtacctttccaccattcactttttgattaacaaggatgctcttggagtttgttttctatttgggttgagatttgatgctgaacaggagaggagcatctttgagctctaggtccacagtgaggggagattgctttgttcttcagttgtctattcaggctgtgagttggttaattacttaataaggtatttgaggtgggcagggacccaaaggtaggctggcaggtattttgtcagtgtggtatccccctggttgtcagtcagctagcagcatttattcctgttctttcaaatgaagactgttgtaagtgtatatgactgattagttaagcccccttttcctttcctttcctttcctttcctttcctttcctttcctttcctttcctttcctttcctttcctttccttttcttttcttttctttccttttttttctcttttttttccctccttttgaatatgagctcattaaatccaggcttcttgaactcctgatcctttgtatccactgcctgagttctggattaggggtgtatgtatcaccatgcccagctcctgtgccctgttttgttttacttttaatcatgtggtctgtatgttggtcacacgtgagcacagatgcaaatgcacactcatgggcatgggtgaagaggcttggcattgatgtggggtgtcttcccctgctcttcagagctggctgatctactactcttgctaaccagcttgccctagggattctctttccctgcctcttgagtgctgacattaaaggtggctgcacacctgcctggcttttccagggttctggttccataccctggcactcatacttgaatggcaagcattttatccactgagccatcttcccagcttttatgtctgaatttttggtgtgtttctgtgctgaattgtgttgactgctgcttgactgttctttccttctcttcattcttcaaaattgagacaactaagttaggagatgaggtggaaattgtctggctttcttttgtgtggtcagctggtgactctgacctttccctctgagacctggatttgattatcaggaccaatgttcagggtgattgtatttggcattcagtagatggttagcatggcggttagcatggctccctgttgtctctttcacttatagcattgcctattaggatgctcgtgtctgcttctagaatctcgtttgttaattgttgtttgatattttgctttttaggagctgtccagacagcatcgatctttccaagctctggaccaagagtacactcagatgaaaaccagacttacccaggagttacagcaagccaagcatgcactcaatgtcctccaggtggaacaggaaaaggtagggccctgaacttcatctcacatatgctccttctatacttcagttgacctagattttgttttaactgattgttaaaagcagaaaaaaatgtgatgtttgatatgtactttttgaaaaatgtaatatttcaaggttaaaacatttcttaaacatttgtcattctttatggtgaaaactttcaaagtcccttgtttcagcatttgttcagaacataattgtgtgtactgagcacaccaaactagaaactgagagctgtccttcccttcctcctgctctccccagtctctgaaactgctgttttctttctggtgtccttgggatccactttttggtattcttgtatatttggttgtgagtctagcccttaatggttgagccatctctccagcccaactttttggtattcttggtaagggagtcagtctaagtatctgtctcttgttaaatgtccttagctacctttaaagtggaaaataacctttattgctcagtattctcagaaaaggggtgaaatgagttgggttttcagatctggatatgagtggaaatctctgatattctggtcattatgggatatataacaatcaggggatttcccaagtggtttcttcccccagatagttaaaacatggacagttaccagctggtttctttaagactcccaagagtgtacacctttgcataccaccgtcattatgatgggtctccagcctggaggtgtcttctgaacttaagactggtcatgtgtacatgggtaacaataatgagttgaccagtgaacttcagctattgtcatctagatgaacatctcctctagtcttctccgtcccaataaataggaattccattcttcacagtgctcaggctaacacttcaggttacctgcaatctcccccccttttttattttaaagatttattatttattacatatacagtgttctgtctacatgtatccctgcaggtcagaagagggcaccaaatctcattatagatggttgtgagccatcatgtggttgctgggaattgaactcaggacctttggaagaacaggcagtgctcttaacctctgaaccatctctcaagccctacctgcaatttttatctcatatcaaaactgctgaatctacctttgtttgtgcatacatgttagtgtatatttgtattttataaagtatatgaatgtattctgatgtgaatgatagtatatatttaatcttttattgtttgaaaaacttaaaagtgcatacaatatattttgatcatatttacctcatttctcatcttaatgctttccagatctgtgctcccaacttcatattctctgtgttgtttttttataacctctgagtccaatttgtgcttctcatgtgctcatgggtatggggccacccaaagggacatggttgaccttctaggggccgtacccttaaagaaaactgactgtccctttcctaaaagccatccgttgtccacagctcctcagtcaggggtgggaggtagctagcttgtctccagtctgtgctggaatgtctgctaacttgatcttgtgcaggtctgtgctcacgaccatagctaacgtgagttcatgactgaagacaggtttcaccctggtcatctccaccctttggctcttacaaatttggcagcatgtggtcttgtcaccattacctatcagagtctcgttttgtcatccaccccagaaattttcccatgtgcccttcctactagctaagaataaatttgacttttcagtgttcacatactatgttgaatacaactgctttaaccatgtccagtggtgcatcctgataccagttaccatgccagcctcttgtctgaccctgcccaacctatgcctgtgcttgtttttagcaatctgttttcagtcagccagagtgaaacttccatcacaaaatcagatcccatagctcctctgctcaacaccgtgtggtcatttcctgtccctgtcactagaccagacaggtatcttccctgatttccctgtggagtccatcttctgccctcctatcacttgcttcattttagccatgtgcccctctggctcttggcaggttacactaagtagagacaaacccaggccgtgattgcagttaaactctcaggttgctgtttactcatggactaggaggcttgtgcctctactgtattgagcatccctggttggtacctctatctccaatgtcagatactgtgttttctttagcgtgtttactttttctctgcagtgtgaacattgaatgtttgctgactcatttgtgtactgtgtagttaggccgatgatctgaaaacataattacttctttttcttgttatttctaaataatgaagtaactacataagcacctgtgtgtagtatagagctgatgcacagtactcaggaggatgtgcattggctacaggcaaaccccataacattctatagagtgagggttttgatgtccttggtgcttctggagccattctgtagatacaagggatgatgaccctgttctcccagtcactctctctttctcttttatctcagctttttttttgtttttgttattctctaagaatagttattattttcagagaacaaaaatactggattttgttgttttttctctgttgtaggtcgtatcagtgaagcagcagttagaaaggagtttagaagaatttaggcaaaagctcaacaaaacagaacaagcccttcaggagagtcagatcacagagaatgagctgaggaggagcactgaggtatgtgagcaggagggtcaaggaacaaacccacaccagaaggaggaagtatgacaattaaaacagtatctttctttaaaaaatatttgtgtgtgcacgtgcacatatgggcacatgtgtcacgttgtgctcatggaggtcagggtaaaacttgtaggcacttgttctttctttctttccgccgttatgtggatctttaggaacacaggcttggcaagcacctttgcacactgagtcatctccctggtccaaaaaatgggctctgtatcctttgtcagtggtttattagtaccatacatatctctattttttttcaagatgttaatataaaagtgttttatgtatgtagaatatgttcatgctttccctttttactttgaaatgactactcatgtatttagcatgaggaattatggatatataagtatatataatcaggtttttatttatttatttattttccaagacagggtttctctgtgtaagagctatggccgtcctggaactcactctgtagaccagactggcctcgagctcacagagatccacctgcctctgcttccagagtgctgggattaaagacctacgccaccacttccccgctataaacaagtttaaaaatttttctgtgtggatatgtattgtatgtatttttgtctgtgccccgcatggtatgcttggtgtccacagaggcaagaagagagaaggtatctgatgtcctagaactggggttacagacttgtgagtctctgggtcctctgaaagagcagcagccacagctcttaaaacctctgagccatctccctggcccctataatgtcaaatttcaaagcagaggtcctcagcctgtgggttgtgacccgtttagggtcacatgacccatttggcagataccttgcatattatgttatgattcatagcagtagcacaattgcagttattttttttaaagatttatttattacgtatacaacattatgcctgcaggccagaagagggcaccagatctcattacagatggcagtgagccaccatgtggttactgggaattgaactcaggacctctggaagaacagtcagtgctcttaacctctgagccatctatccagcccccacaattgcagttatgaagtagcaacaaaataattttatgggtgggagtcaactcatcatgaggaactgtgttaaagggctgcaacattttgaagattgaggaccactgatttaaagattatcatagaccacttgatgggtggaattatggaacaaaggaattgttcagatttatagggaataagtgaaactcaatgtggattattaaagttatagctctaccttcttctcccttttgcttcttcatttgtttagtcatttatttatttatttatttatttgtttatttatttatttttgaggtgggttctcactctgttgcctatgatggcccaaaaccaaagtagctaagttaggccttaaattcctgacctcactgccccttcctctcaagtgctgggattacaggcctgtgctggcatgcacacttgctttttgttgtatgtgtcccaggctagtttggagcctgccttgtctctacagtgctgggatctaaatccctttttgaagggttaattttagaaatgaccttagttcactctcaggtcactgctaaaataaacaaataaacaaaatcatgcaattatgaatgatattaccctttagaatcgagcattgaccttaggatcccctgggcggcctggtctgtgttgcctgtagattcctgttctgctgtgcagtggatgaggaagtgtcatggctgtgggagtgttctgaggatcttatgcctacccatgtcaatttgacttctgaagttccttcatggcctggaatttgttttaaaggacttaattaagaagcatttaggaacagctaatggactgcaatgattggaatagagccagaaatgaacagagaacaacaggagatcagtagaggtgtcttctcagatactacaggactaaaaggtttttcctcctatcatcaaaatgttttgtcatcacttttggcctgctaacaatgaaagaaaaacaattttgcttataacagtgccttatctaggtgataaagtctaagtatgtttgtccccatggcatttcactgtaaatgagaacacctgtcatagcaaagaggaagttattaaagcagccagcaacaaagagggagcactgctggagatggggtggggtgttcgactcctgctccccaagtggaagccattcagtcagatcctgtgatgggttcatctgcaaacatttccagtgtgtgtttattgcagcaaaacaaatgtttgccttttggccagtggggaccaaccaacagatgcttctgctaacatttccacaggcagactggcatggagctcttccctctgtgagcttcccttttagccaggaactctcctgcaactcgactggctgcctgtggaaacattttgtagaactatcatctggttcagagtctaaacaccttttaacatgacttgctggtgtattttaatatgctggacattgtcttgcagatgtttctgaaaactgactttatccccgtggggtttggtttgtggtgctatctctgattccaggctgtgcttcatcatatgtctaccgtgttcaaatgaagatagtcctgtgtggaaagtgctcacaaggcctgcatgtgaatttaccattcattgtaattatgtttgtgtttgtctgtgagtcttctggggatagcagtaggagttgaaagggcttctctggctcttgtactttgaactgtggttcaaaggtcagagaagtgacttgtcagagtgctgatgtaacttggggattacagtggtgatggctctaatgggagcaatctgggtacacactgttgggtacttgttaaccttgggatgatctctttttagtctgtatacagatgcaaataatatctttccctttcaagaatgtattcatgattaacttcaacattgcatataaagtatgtggcctggtgcccagtgtgtaagtgtgtagtaaatcatggaagtccacctgcttgttgtttttgtttcataaatgttaatgaccttcgatgttggaattcttcgtggtcatgtcaggcacagaagggtcatgaccaaaagacagtgcatttgagagttttcatatttaaaaattttgccagtttaattatctggtgtctttctatatctaataagtaagcacaaacaagctcaacatgcttataggttttggatgctgaaatgatgtgacagttgtgctgaaattttccttgactgcattttgtaaactaatacttctcgaaattagaaattatcggtgctggaaatgtgatttaatgacccaatcaagggtaaagttagcatttagtatcaaagtgatgtgtgtgtgggggcgtagataagctgcttaccctgcttcaagtgccagcctctaccgcactggggtttggtggtaaaatgccatcattgacaggcagaggatgaggaaacacttggggacctttctaggcatagggacctgtgttgtattaggtctgaggaatgtggtctagcaggcaagaatgccaacatagaagggagagcacatctgctgcacccatcccacaccctcatagacagccttcacccagcaggggacatagcaagctgtgctcatgggtgggagcatgaaatgccacacactaactgcagtttgtttgtctggccctaggaaatgatgcttcccctgctgctcctaaagcaaagctgctctgggtgggattgcttgctaagctcagtgctggctgtgcttatggagattgctgtgcttttctagagtagtgcccaattttgcaaatcgcgaggacacaagagatgcctaggagaatatatccttgtatgcttaactcattgttgctaatgagctacccaatcaagacttaagtggctgtagcctcatggaaaactaattgctgatggatgacagcctgtgcatccattttcagatgtttattttctaaattctggccccttaaaattcttgggtcggtctcagccatagcattataagcctgctgggtcccaggattggctgagcattccttcgttaaggaacaaatatttacagagttaatgccaaaatggagacaggcactctaatcttttcattgctcttgctattttctcaaatgtctgcatttatggactaagacacagaggccaacaggcatgccgtcatgacaacaacccctcccctatgtggtaccttactctgtcctccccccatccccttgtaaactattttccttgtggagtactctcagttcatcacatagtgtcttcccagcttctttatcaaggccaagatttaatttgattttgtttttatgactaagaataatttgtaagttataaaaatagtaagtcaactcatgatttacttctgatgatcttgcaactgttacatttggggaagaaatagtaataacaatgccccattatacttgtcaaaatgcttcaagtgttctgtctttcacatctgtgatctcattagatgggtgattatcctcagcctgaagaacaaacaagtgattatatttctgtatattaatgctaattttaatcagttacattgtttgaccttgatgatttttccttgtaggcttgagtactgacctgtatgcaggttaacccttcagtcttgttctattgtacctgccctttagttctcattgatgccttaatttcatagccagtttcctagtgtaagcaagacaggatcagaacacagtagacaggagtacaatactgacaccaggctctgtctcattttaatgatgaaatgaatgtatatacatgaacacagcagctgccagcaagttttcaagtactttctagtagccagattctcactcttcttgaatttggctttgttacatgggtacccatctgctggtagtaaccagactgataattgaaggcagccttccagcatagcatcgccagggccatctgttttctaacagtgcagtagggttttgaaggatgggtctttaattgtttctttaagatacaaaaaaatgtcttcctacttctcagaagggtatttttgaaatgtaattttttaaaataagtagccttatggatttctttcattccctaagatgtgagatacttagtttttagtttgtggtaatatgccaattcttgagggtagggtatagtatgggtggaggtacctttaaaccccccgcccccccagggccttcccagtgttcccagacagaagcaggcagatcttttgagagtgaggtttgcttggtccacagaatgagactctgtgtccaaaaaaaaaaaggggggggggtgctggagagatgtctctgtgaatacagctatttaactcagtgtgccaaacctgaagacctcagttcgatccctgcaacccatgtggtagaataggagaactaactaccctaagttgtcctgttttccacatatgtgccatagcatgtcctgcctcctcagtgtatacacccgtacacacactaataaagataataatttgaaaaactaaaggaaacaagtttcagtgtgactagactgtttttactatctgttgtgtttccccctggtttcgatcatggtttcccaacatagtagaatgactctgtacatttatgtatctgtgttactttgctacccattcctgtgtggatgcatatttaatcatggtccaaggaaactgaatgttcagattcctccatccaagatggttctgtgctagcctgtgatactgtatggattattcagtaactttctaatagttagcttagctctgttaggtgtgtactgaatgattaggaccacaccttacactatggagagtaaccctgttgaaggtagagactcttatttatatatgaggttttcataatgtatgttccatggccattgtaaatttttcgatgaaaacatttattgaaggatatttcatctataagtacccttttaagatagtatacctttagctggttttgcagtgaaaaacaaaaatttgaccttggaacattatggtttagtatcacatcatatctttgcaaagatagtttgactaatctggtttgataggaatctgcaaaacttttgtctttgatcttataaataggctttttcatagctaaccctttagcaagcagaaatatttcctgaaggtataagataatttttaatgtttggtatctgcttttatgatgtaagttgatttaaaaaagggaaagttcattccttactgtgaagggcctttattaagggagacgttgtgactcgcatgagcatttgtttagattaaaacaagctaaatgtgttttcaggaaatgaagaaggaaaacagtctcattaggaatcagtctgagcaaagggccagagaagtctgccacctggaggatgaacttggtaaagtcaaagtgtgtttgagccagagccagaattttgcagaggacatgagaggtgagttcagtaacattagtgttgtgtatatatttttttaaatatttacttacttattttgtgtgtctatatgtgcatatgtgtggtgtgtgtgtgtatcagagggcagtttgataaaagaattcttcctttcaccaaatggctcttaggtttcagtctcaggtcatcaggcgacgcaccaaacacctttaacccactgagccatctcagcagcccagaattctattaagccgtattcccactaggaaagattggtattagcccactggaagaatctgcgtccttttctgtattcaccccaaaatgtccctgcagttgattaagttttcttttttgctgcccagtttccagtgtgatagttgaacttttaaaaattggagcacattgagttccaaaatgcatgtttttcactactttaaaaccagaaggacaaacattgctacacaatactatattggcagtgcagactcaccctagagtgccgtaaactctacattaaatgtatgtgttccagtcccttaatggccactatattttgataatttacttgactaaattaccttacttcctaggtttacagccaaagaattaatgttgtatgcagcaaatgaatccatcatttgtttatatttatttttagcatatcttttacataacattttcttgatatttgcatatgaagattttatctctaacctgttgacctgagtatgtgtgacacttgtatgttttgtttcatgttcattcttcttttgtttatttggactgggtttggttccaggctgtgcccgaaaaaacctcctgcctcagtttcctaagtatctagaactgaatctctgagactgctttctttttcctgtggcatctggtagaagtaccagtcttcagctttcctaaggagaactataagaatgtatgacgactgggtcatttttcagggttgatcaaaagtgtcattgtttgaggccctcaaatgcaaagtagaataataatgcctttggggtgcttttccatacgtctttaactctcattgggtagatttgaaattaatggattagaagtaagtatagtttttcatttaatattatattgcattacatactatattatattatttgccatagaggctttcaattattccctgtttccaccaggccttttcattactgctaggtgaaaatattgccattgtcagtaggacaaaaataagatagtgataggagcttccagatgagtctcaactcctctcaatacacttactaaggagggattggaatgtgggtgacattcttgctcacaaataacatactttttttaaaaaaagaagtaattctaaataccctgtaaactcttaatacatcaatttttattaagctacctaagagattatcaaatatattactatactaaaatggccatttttctctctgtctttatataaacttagatcataaggtcatgagatgagctattttcaagaacaccagcattagtgtcaagttttacaggactggagagtattaatttcattgcttttttagtttagagtttaaaattttagaagccatagactagacatgctaggcatctttcccactgaattacaccctgatgctagaatataatattctgatgaaaataggtatttgttataaacattgataactttgtgttcatttgtttgttttaatagctaagaatacctctcaggaaatcatgttgagagagctccaggaaaaactaaatcagcaagagaactcactaatattagagaaactaaaacttgccttagctgatctggaagggcagagagactgttcacaagacctgttgaaaaaaagggagcatcacattgaacaactgaatgataagttaaataaaatagagaaggagtttgaagctttgctgagtgctttggagttaaaaaagaaagagtgtgaagagttggaagaagagaaaactcagttttcttgttggaaaagtgaaaatgaaaaacttataaatcagatagaatcagaaaaagaaagcttacagagtaaaatcaaccacttagaagccagtctcaggacgcaacaaatacaaagtcatgactacagtgaaagagtaagaacactggaaatggaaagagaaaaccttaatgtggagattagaaacctccacagtatgatagacagcaagatggtagagatcgagacacagaaacaagcctacttggagctgcagcagaaagctgagttctcagatcagaagcatcagaaggaaatagaaaatatgtgcttgaaagctaatgagctcactgggcaagtcgaagatttggaatataagcttcagttactgtcaagtgaagtagtaaccaaagagcagcagtaccaaggcttgcgtactgaatatgaaacgctgagggatttgctcaagtccagaggttctctggtgacaaatgaggataatcagagaagttctttggcttttgaacagcagccgacagtgagtgactcctttggaaatctaatgggggaacaaggaagcatgtattcagaaaggagtgactgctttgtagatggggaccaaacttcagaaaatctatctgtcttacaaaatagagtcacttcacttgaaagttccctggagtctcaaaaccagatgaactcggatcttcaaaagcagtgtgaagagttgctacaaatcaaagaagaaatagaagaaaacctcattaaagcagaacagattcatcagaattttgtggatgaaacaaaccaacgcattggtaaattgcaggaagattctgcagttcatcaaaatattgttgctgaaactttagcaacccttgagagtaaggaaaaagagttgcaacttttgaaagaaaaattagaagctgatcaaacagagattcaagaattaaagaagagtaactgccttcttgaagaaactctgaaggagctacaactttcgtctgaaactttgagctcagagaagaaagaaatgagtgacatcatctctttaaacaaaaaagacattgaagagttaacccaagaaaatggggctctcaaagaagttaatgaggccttatggcaggagaaaatgaatttactccaaaaacatgaggagatttccagatgtgttgcagaacaagagagaagcatttcagagttgtctgatcagtataagcaagaaagacatctgttgttacaacgatgtgaagaaacagaaactgtgttggaagatctcaggggtaactacaaaacagcacaagaaaacaatgctaggttagaatgtttgctcagtgaatgcactgctgcttgtgagaataggaaaaatgaactggagcagttaaaggaagcatttgcaaaggaacagcaagaatttttaacaaaactagctttcagtgaagagcaaaacaggaaattgatgctgaagttggagatagagcaacaaactgtgaaatctaagattacagacaccaaaatctattctaagagtgagactgatggtctaaggcaagagactttaaaggaagagcaaaataaaaaggaaaaggaagttagcaacttacatgagaacgagcaactaatgcagttaactcagactaaacatgagcattatcatcttgaagtagaatcagttgagaactctgtaaaagcaacagaagatgagataaatatgtgtagttcccagtgtcagatggatattgacactaaagacatttctcccgacagttacaaagcacagttggtacaactagaagctttgattaaagttatggaagtaaagcttgatcaaagtgaggaggagaaaaaaaccctgcatcaggaattacaaacaattagaggggagctagaaactgtgagttcacaggacactcagtcacatgaaaggattggccttaaagactgtgaaatagaagcagaaggaaagtatgtgtcagtgctccatgagttgtcaacaagtcaaaatgagaatgcacacttgcagtgctctctacagacagcattgaatgaactaactgagctagggaaagtgtgtgaagtactgaaggttgaaaagttaaaactacagtctgagctgaatgactctagatcacagtgtattacagcaactagtaaaatggcagcagaggttgagaagttagtgaatgaagtgaaaatcctaaaccatgaaggtgttcttcctcagagcaagctaatgaaagatgtgtcagatgtgttgcatgataaacgaaacatgactcctttggacagtagcggtttctgtgaacaaataaccttgtcagacaaagaagttccagtgcactttgctgagttacaggaaaaattttcctgtttacaaaatgaacacaaaattttacatgatcagcactgtgaggtgagctccaagatgtcagagctgtgttcctatgttgacacattacaagctgaaaattctgtcttgtcagtgaatctgagaaacttgaagggtgacttggtaaaagagaggaagcctggagctgagaatggacatactctgtcagtgtcgttctgtggcacagacagccctagtctgacaaattttggagaagctttgtacaaagatgttttagaacaaactgacaacacatctcttctaagcttagaagggaatgcttcagcaaacccttgtaatgtagatgacgtgtcttacagcagtcttgaggaggaaaatctgactgagaaagaaattcctgctgcctctgtgaggactattgaagaacttgaaatcctatgtcaggtgtacttgcagtccctgaaaaatctagaagagaaaatcgagagtcaagggattatgaaaaataaagaaattcaagagcttgagcagttattaagctctgaaaggaatgagcttggctgccttagggagcagtatttgtcagaaaaggagcaatggcagcagaagctgacaagtgtgactttggaaatggagtccaagttggcagaagcaaaacaacagacgaagaatctgtcccttgagcttgaggtagcacgccttcagttgcaagagctggacttaagctcacggtctttgcttggcactgacatggaaaatgtaagtacttgggatatacatgctgtttctccatgtgcatgcttagttaaacagtaaatgcttgttggattgaagtaaatgtgaaatcaagattggagtattcttaaggttccaggagataaatgaaaaaaacttaccaaaaatttctcatggccaaccagaactccaaaaaaaaaaaaaaaaaaaaaaaagaggaaactttatttgaggaataaatgtccatcatgattcttttatggaaaataactaaagatgtcttacaaagtctaaagttggaagtctttagaatgtatactctcttggttactattctgttgctatgaacagactccatgatcatggcaactcttacaaaggaaagcatttaattagggctggcttacagtttagaggtttagttcattatcagcatggtgggaagcatagaggcagagatggtgctggagaggtagctgagagttcttcatccagattggcaggcaacaagaagagagagtgagcccctgggttgtcttgaacatttgaaaccccagtgacatacttcctccaacaaggccacacccaatccctgtcaagtgccactccctaatgaccaagcatttgaacatatgagcctatgggggccattcatattcaaaccaccacatatacttttactgattaataaggcacaattaaatattatcaacactgatgtgttaaggtggtttagccttatgcctttcagacttttaagtggtatagcattagttcttaagtgagatagaagatattatttaaatgttaattttctagcagcttgcaatagaatcagttatttagagaaaattgcttagttccttgtgatttgtcttttctagttgatcatctcaagtactaatgctatactgtttgaatcttaactctaattctgtgaagtgaaggtcataagtcatattgaggtggtagtaggaatcaaaatcatagcaccccattttgtagatgaaattgagataaaacatactttatccaggaaagtgctaactaggatgaggtctttggactgaaaatctgctcattaaacccttactgcttttcttggtaaagaacacgagtactgaagagcatgttcaccattttacctgaagtttgtcagtctcttatttggtaatcacaaagaaatgctactcttttaatctgcctgaaagatgcaattttcattttagatatagttgaaatacatgttctggagggttcatccttatggtaaatatcttacccaacactttgcacataggtagaaccccctgaatgtttgtgttgactgtctggatagagagcaggattgaataaagtattgaaagtcatgctgttgggaggaatatgcatagcagcacccatacgggcagttctgtgaagtaatagttaaatcactgattccattttgactcttctgaaaaataatattctttcttggtttacattatgtttacaggctgtccagggccaaaatgatagttacgatataaaagaatcagaagtgtctgtttcagagactacagagaaaacatcaacgcaggacactgatcagacttgtgataaagatgttcaacaagacctttgtctagaaactttaattaccaagactgagacagccaggttcacaggagaggggtgtgaagagcagtccctacagaccaattgtgaggcatcagcagaggacaaaacccaggactattcggaatgcatttctgaattgttttctagtcctaatgtgttgatacccatggatattctggaagatcaggggtctagccagaatctccatttgcagaaagacacatcaaatgagaatttaagattacctcctgtagtagacgactgggacaaaaaagttgaaagtttgctaaatgaaataaaagagtcaggttcaaaacttagtttacaggaagtacaactaaagatcaagattgaaacatgcatgcaattggaaaaaatagtcaaggacctcaagaaggaaaaatctgacttaagtgaaaaattggaatcccttccttgtaaccaggaggtacaccagagaatagaaagtagagaagaccttgtttttgatgtagaattgggaacaagtaagttaagtggagctattaaagacagtgcagccaacatagaagacaattggaaggaaaagtttcttgatgtggaaaaggagctgatcaggatccagtctgagaaagctaatcttgagcatctcatcctctctgtggaagctgacttaaaagtggttcaagcagagaagcttcatttagaaagagacactgaaagcaagcagaaggttattgttgaccttaaagaagagctatttgtagttataagtgagagaaacaggctttgtggagaattagatactgtgtcagaagaaagaaaagcactggatcagatgtctaaaaagatgaaagagaaagtagaagagctggagtctcaccaaagtgagagcctccgtcacattgaggtggtagaggctgaggtcaaggacaaagcagagctccttcagactttgtcctttaatgtgagtgagctaacaaaggacaaagcccatctccaggagcagctgcagagtttgcaaaatgactcccagggattatctttggcagtaggtgaactggaaatccaaattggacaactgagtaaagagaaagaatcactggtcaaggagtctcaaaacttccaggtcaagctgactgagacagaatgtgaaaagcagaacatctccaaggccttggaggtggcactcatggagaaaggtgagtttgcagtgcggctgagctcaacccaggaggaggtgcatcagttgagaagaggcatcgagaaactgagtgtgcgcatcaaggcagatgaaaagaagcacttcagtaccgaggagaaactgaaggaaagccaacgtgaaaatgactcattgaaggataaagtggagaatctggagagggaattggaaatgtcagaagaacaccaagagctggtgattcttgatgctgagaattctaaagcagaggtggagaccctcaaggcacaaatggatgaaatggccaaaaacctgagcgtttttgagttagaccttgtcacagttaggtctgaaagggaaaatctgaccaggcaactacaagacaagcagagtcgagtgtcagaactggatgagttgtgctcttcctttagaagtctgttggaagaaaaggagaaggcaagagtacaaatggaagaagactctaactctgcagtgctgatgcttcagacacagttacaagagttcagtgagcaaatagcagccctgtgtaatgaccaggaaacctcgaagacccaagaacagagtctagaccaggcaggggaagaagtgcatcccttgaaaagtagcattcagaagctgaaagctcgcatacatgctggtgaaaaagagcagcactgcctcctcggacagctgagggaaagtaagcattatgcagatgtgcttaaggacagagttgagaaccttgaacaagaattgaagctctcagaggcaaacagagagcatgtgactctcaaagctgagagttccaaagcagagatacagactttaaaatcagaaatacaaggaatggtccaaaacatccaagatttagagttagaacttactaatacaaggtcagaaaatgaaaatcttatgaaaggattaaaacaggaacaaaagcgagtgtctgaattagaaacaaaaaattcttctattgaaaacttactaaaagaaaaagaacaagaaaaggtacagatggaagaggaatccaaaataacaatggagaggcttcaaactcaattaagagagctaaatgagacaatgatttccttgtgcaatgaccaagaggcctataagaccaaagaacagaatctgagtggtcaagtacaaactcttgaagttgagaaggcccagctgctgcaggatttcggtgagaccaagaataaatacattagtttgcagtcttctgtaaatgtcctcactcaagaaataaaagatggcaaacagaaactagagaagaaggaggaagaggtcaggacactggaagaccaacttaaaggtcaagaacagcttgtatgtaaactttcccagttggaaggagagcagcaactctggcagaaacagaaagtagaactgggaaatctgactgtggagctggagcagaagatccaagtgctgcaatccaaaaacagcgctttgcagcacacctttgaagcactgcagaattcttacaaaagtttagaaagtgagcttggattgatgaagacggagaaagtatcacttgtgcaaagagtaagtgccatgacttatttccctgtggaagtatggtcaggagggagggactttgaaatggttccctgactgtgttcctagggtcttgactataggaatattgcatcagctcactcagcagtgaccactatgatgggcttataaggggcccccctttttttgtgaattggattagggttctgatgtgacctcttcacataggggaaccttgggtttcagggtttttaatatctgtactttaggttcactggggtggaaacatccccttatccatttgagaaccaatgtggcaagagtgtaacagataatgaattagggtctgaaggcagtccctgccctttgcacctttaggagaaagaatgcctaaatacattgatgtaattaggatcagtggaacactcatggctttcagggtatgggttgagaaaaatcagcctgatcaagaaagggattcctaagaattaaattttttattcaacaaataactaaaaaagaatttccagaaaatgaagtctatcacaactatattttccaagatttgtatatttataactttaatccttggcatgtttctattgaattgaaatagcatggtgggattagtagagatttaagagcagataaaaatctaagacactaaatacaaaaaataaggcactccttcaaaacattctctgatgttgtttcaaattaaaacctttgtaaagagtcttaagacttttttttcttactgctattttaaatctttgctgagaagaaaatggaaactcattagtaggttttgagaaaaccaggtgagtggaaggagggaggatcagccaggttccgttttcttaaagaaacagtgtgtgtctagcagtggttagttcagtaagaacagactacccagagcagttgctaatgaatattaaatttcagattaacacaatgattgggaaagaagcacagctacagagggagctgcatctaatggtacagaaaacaacaaggctgaaagaagaattcaataaagagaaaaataggctaaccgaagaattaaaagttccagtagaagaattaaagaacctcaaagtaagattcctcaaggcagatttgttatgctctactaatttggcatgcctactctggttgactgtaagacattctgtagtgtatcaaactttttcaggtttcggaacccaagcttgtatagtgctcagaattgtagtgattttctgccacgaaccaccccagccgggtatgggagtccctgggatgagagtccttgaagaataggtgggtaaggatttggcagtaacaaacagaaacaaacatagaggcagtttgaatctgagtgtattttgcagttctcaaacaaggttttttatagagatattttctcaggggatgtttttgttaaacaaacccaaacatatgacattattgttacttggcacagtgacgcagaaatccaaaacataggatccagggttaatcaaaacataaaatttgtccttgattagtcaaaacataagaccatccttgattaacatagtatcatccaaggctaaccacatatttcttaaatcaaattaatatatttttgtggtcagttattgtttaacatctattacctagttcttgtgagtttttgaagtattgagctattttaactatttttactctttcttattaaaagctttcgttaccagacacttaagcccactttcgatgacacatgtatagccatatgaaattttattgttggggaagtttttactatttgtacttacatgagtaacatgaatgatttggaaaactggtttttcctgagatgaggtcctggctagtaaccccatctcaggggatggtttcttatctatttcttttgtttgaaatgtcagcataggcttttaggaacatttcattaatgtgaaaaaaaggagtagaaaaacaaattgccgagagaatcacagcccaatattttactctggctgagagttccacaaccgtttccaggagacctccttttgaagttatcggctcagtctgtggaacttgtcacacacaacctactggatttgttgtggcaatttttatcatctaacacatgtgatgtgatgctgaaaaaattcccaaacccacattggctatcagggagatttagggaactgagaagagaggggggattgttttatgaatcttgagatgttgtgttttaaacataactctagtatatgctgctttaatatgttttagttcttctatatacttgtaaaatgaaattcaaggttttaaatgatattacatgttttttgtaggtagagcattgtaaatctgtgaatcagcttgagaaggaatttcagcgtgctcaggggaaaataaagttgttgctcaaatcttgtaaacagctggaaagagaaaaggggatgctggagaaagagatctgccaacttgaagctgcacagaagcagaaagctggtgggttttagctggggcatactgtcttctggaagtcagcattcacctcaatactccatttgtactcatgtttaaaaagtactttaatggcttctttgtaatattttcttttttgtgggtgagggggtttcgagacagggtttctctgtggctttagaggctgtcctgcttctgcctcccgaatgctgggattaaaggcatgcgccaccaccacctggcctttgtagtattttctaatttctgaattttgggcttaaccttgtgtggtaactataggattcagaatggagcctacatttcgaaatataattatttccatggaggaaaacctgaatggtgccttttgctaatggttatccataaagagtttgctattttggtactgtttgagtagcttttttcccccccttttcttctgcttattggtaattaacttgccacttttatccacccacatattctgcttttccgtggctggtatgtgtgggaggcttctagatcaagtgtggcagggcagttcagtggtttttcccattgagagtgtagttggagtaggttttggaatctggaagtttgcctcatgaattggttgccacccctggcatctagactctgattgaggcctctgccttgatgtggttcttctacattggaccctaccaacccactattctctcaatgttttcacagcttttgggcacctgtccccaaaaccatacaagaaggactttaagatcattactgaattatagtgcttattcatttgtggcagaaagaaggatgggggaagggggatataaaaagttaatttgcttgatctcttgtagctaattctataagggagttaaagtttggatgggttttatttaaactatctactagattgtgcttcatattcttcagacacgaacagataattgtccttaactcctggaaaagttcaaagaacaggcttaaagattacctgctgggaactgtctataacgatgctcgggagcagctgcaattgtaaatatgatgtgtcactttgttttctacaggtactgttgtgggtgataatgtagctaaattaatgactgaaaacaaagagctaaaagagactcttgaagaaaaaatcaaggaagcagataagtacttggataagtactgttccctgcttataagccatgaagagttagagaaagccaaagagatgctagaactacaagttgctcgtctgagttcacaacaatccaaacagcgtcttcacagttctcctttactgaattcttcggttccaggaccatctccagccacttctgtcagtgagaagtcaacatctggccaaagtaaaacttcaggcaagagacaaaggtccagcggaatttgggagaatggtagtgggacaccaccttgtgcaccagagacattttctaaaaaaagcaagaaaacagtcaatagtagcgtgcatcctactgaggacaaggaagagactaagtttgaactagagggactcccagaagtcgtaaaaaaaggtacgcatagtttacatacagaattatagggctgagggtgtaaaccatgtgcttagcttgcttgtgaccctttattcaattcctagtattaaaatgtgaaattttgagatttcacataatagtcggcatgtgcaaagatagaaacctttactttttagggttttcaattatcatatattagctgcctggagagactagtccattaaaagtctgttagaaattctttttttcttatttttttaaatcacctttccctttcttgagccacatgaactggacaagtgatctggttgacattgacctcctagaagtgagagtttagaattttcacacctatttgatattgttgcagtctctttaagacataagcagactttcccccttactaattcggtcttgatttttaattctttttaatattttgagacagaatcttcctgtgtatctcaggctgttcttgatcttgaagcatttctgtcttatcctctttgtgctaggattgtagacatgtgccatcataccccagcttcagccacatagttttatttaaaaaaaacaaaacaaaacaaaacaaaaaaatctgtagcaggttggatcttttgccctagtccttgaaatcataactgattggaggagttatattctagtaaccatggttccaaagtatttagctagctgtcactctcttgatgactcatttgtaagggattaagagcatcgcctgtagttggatctgaatgctgctgtgatgagagtgtctttgtggctagccttctcttgttgtcaccagtcaggtcagttcctttcctggaaggaggcagtatgagcaaatacaaagatactttgacaagtcctataatcactattcgtttacattttccctcttcagacaggactggccttttcccattccagttccattgtgtcaaatgtcctgcctgtcttagaaaatgcaagatcatgcaaccctgtagaaaaagcaaaactttttgttcttttaaatgtgattcttcctgatcctttttccttattgtggtgtctttaaatcttttgtctttctaataagggataacctgttaattttccaattcatttgatgaccacctaggcaattatgtagtttaatactttgttctctgtgactggagagaagctaggtcttgtagttatttttacttttagttatttttattttattgaaactttgtatacccacaagcacgtgaactcctttgctggcacagctaaaatggaaagtccctaatgaatgccatttctgacaagcagcttttttgcccttagggtttgctgacattcctacaggcaaaacgagtccatatatcctgcggagaactaccatgccgatcagaaccagcccccgccttgctgcgcagaagttagtgggatcctccccaacaccaggcaaagaaaacattgcagagtcctcaaaaccaacagctggtggcagcagatcacaaaaggtagtctgtgaatgtcatttcctgcctgccatcctggaagtctgttaggtggctcagggttggctgctgtactttctcactcagaaatcccagagtgagcaagtctaaggatgcacagtttcctgaggtctaatctcctcctctacccaaagggctgctgtgaatagcttcctgggaaactcagtacatttgtcagagagttctcagcatggcttaaatggtgtaaagaggctgttttcttttgggccacaggttttgatcactgttgagattttacattctgttagtctcccctctcctgtcaaggcttctgatctctgacctttattctttacattgagcataaggtggagaatatttgctcagctgatttttatttctaatactgtaatttgtattaacggtaccatttttgcacacaagtacatgtgttttacctaacttttaaaatcccaggcttgccttgaactcctgatctttatgcctccacctcctgagtgctggcattacagatgtgcaccatagctccctctctatgctttgtgcacaccaagtttcaccctttctctctctctctctctctctctctctctctctctctctccctccctctctcttttctttttttcttttcaagacagggtttttctgtgtagctttgggacctatcctggcacactctctggagaccaggctagcctcgaactcacagagatcgcctgcctctgcctcccaagtgctgggattaaaggcgttcttttttttttttttaacagagaaataatgtaattttattataatctcaaaaacaaaaagacattaatagcaaaaagagacaataaattaggaaagacttatgaaaaacttcaggatcgaaataacaaacaacagtagggttttggttaatctaacaaagatcatattagcattatcttttttttccattttttatttgtgttagaaacaagattgatttacatgacaattccagttcccttctccctcccttcctcccctaccacccccccaactaaaactctacctatcacacaccctttcttctgttcttcacctgactcaacctttctgttcgctcatgacctctgcatccttcccattacatttcttaactcaggtttatttgttgatgtcttacactggtgtggtaaaagaatgaaggtgaccttcctgaaagactcaaacctccccaggttcacacctctgttttgcagcttgtttgtatttctcaaactgggaaccctgggaatattcttggaaatttctaaagtaacttcaggaatttttaaaaatttgtgatgttactttgctcacttatcagagtttaagtatgcaattggataaccttcaactagcaaaaaaaaaaagaaaaagttcttcacaagtgtagtaagtggctcttgtatgttagggttgttagcacagaatccagaaactggtgattagttgtattaaaatagcaacacattacaaattggtttgttttgattgatgtggaaatggtatatatagttaaaccttgtaagttagggctaacagtgaggaaggatcttaaaattttcatacactggaatggactggtccactcttcatggtagaagtagtaaattatcctgtgcagttttctccttccccctcagttatctctgttccccactctcacttggagtcaacagtactgaagtacaggagagtgaatcttgactcccccatggatgaggaaagctctgtaaaacagcaggctccctgaaggagtgaagctgagcagctctgacgagctgttggccgtgggatagccacaattctagggatccgtttaggatctggtacagactgccatttgccagctaggggatagggagcacctttcactcctcagttacaaaaaaaaaaggccagctccttcctccttgaagcgtatgtaatacagatgttctgtatgtcaggatccttacaataggaaaacaggcactaagctaggatctggactcctgtcagaaggaactgactccctgggtactgcttgcccaagtatctgttttctggtttgcagtatgtgactagtttacctatgtcatcatgactaatgaaaagtcagccatttaacaaatgtttgaggattgaatggaactgtattatcttgaagtgactttagtaataaggcttttataaagataggaaactgtcctatgaagttaccacagggtcttttcttttttttataagaaattgatggtaaaagcagtttgcatgtggtgttcagatttattacctaggagaaagagttttgcacactagggggcctgcactccacactgctgtggagcctgctggtatggagcagtaaccatggtttcctgcagatttgtgttttctgcattagctacatgcagtctagtcggcaccagcagttatgaattacaaagcagttttgtgcacttgaagaatggcagggggtcctcttgaaaagagggtctaggagactttgattagattcacattttaaaaacatagcctagtcattttcactttaagtcagcattttctgagatgctctgtacaagcatgtttcatccttgagtttagaaaacacagaacaagattttgttactaaaacaggtgctctgacactcaaaactgtaaattctcccctaaggtgaaggctaagttcaaggcagctcctcatgccatttgttagcatctgatgagtgcagggcagagaggaatgactgagatacatggggtgcattgttctgttgatattgtcattgagatgaggacgcccaaggaatcctagtctgctagagacagaagagctgctgtttgtagacttgattccctgatggttctgcttgggggtctggcctctataaatcataggactcacatggatggtagtgattccttgagcatagatagggtcagttaacagctctttgaggacattgtattactccccccaccctcaccccacccctgctagtaggattcacttctaccaagccgtctacatctctattctctccccactctggctgcagacctcactggtaagatgggtagtggcactgtctgttagattcagagccttgtctggtgtggaccgtcagaagcagactgtgtctacatgagcatcacactcgcactttacaatctgactcagttccatgtcagaaaagccaaggaatgttctgcagtcacttcattaggttttgcggttttgctgactcagttccttatttctgtgtgatccatcattctccctgctttcctccttttcttgttcactgaatgtccctgtgactggcagattcaaaggaaatccttgtcttggttactctcattgcttctcttaaaaagaaacaagaatggtagtaccaataaaacttcttcccttcaacttttcacacatggtaatttcccaccaactcctggtccttggctgctgttttttagtgtcctgtgcatatgatctgagatagaagcaggctttcttatttactgtgtttttcttttcttttttaaaaaatatgtatttattgtgtatagtgttctacctgcatgtatacctgcaggccagaagcaggcatcagatctcattacagatggttgtgagccaccatgtggttgctgggaattgaactcaggacctctggaagaacaggcagtgctcttaacctctgagccatctctccagcccccttactatgtttttcataatgcaaaattatctaattgccctttaaagtcacatgcttcctatagagagactataaatggaaaaacaaccttccattcttttttcttaattaaattttattttatcttcttaatcttccatttttttttcctgtttcgaaatgatacctggaaattttattttgggagtgtctgtcatgtagttatttttgggacactgcactgaagacctatctgtacttgcagaatagtcgttcttttaaaattgttattaattgtcttttccgttttggagggtgaggtgcagtactgggtagaattgaacatagggcttggtgtatctaggcaaattcccagccttcttttttaatttttaagacagtgtctcactaagttgtctggctagcctgaatttactcttaaccaacttcaagcaggccttgaaaattgttatccttttcccttagcctcttgagtatctaaattgtcaggcctcattaggctgtttcgtttttgttgttttgttttgtttttagttgcgtctcactgttgtgcaggctagccttgcactcctgggctcagctgatctcaagtctctcaccttgctgctctgttttcttctgaagatcttgtctgtgaatcttccattcttgcttttaacttcttgtttgtgcacttccttgtcttccactttattttgggacaaggtctttcgttggtctaaagctcactaagttgaataagccgatgagccagcagtcctagagcacggtcatgcccagcctttttatgtgggttctggcaattgtacataggccctcaaatttataatacatagccttctccccagctgttcttattctcataccttatatttcttcattatcctatttatcataaattttgacttagcaactacatcaacatcttaccatttttttagttttgttttctggtgtaatctctttcatctaaaagacacaacatcatgggggatttattctttctggacttcattattagataactgtcttccaaatctagtatggaaacaactctattaacagagtgattgagagctaggtgatggtggtacacacctttaatccctgtgcttgggagacagaggcaggtagatatctgtgagttctccagccaggtctacagaatgactttcaggacaacaaggtctacacagagaatccctgtctcccaaaaccaaaaaaggaaaagaaaagagagtgtgattgattcagtatgggtcctaggtgcttgccatattgtaaatagtttttccctctgaagtcagttgtatgcacttgtattgcacttgctttgaatgcagcagggattcgggaccattgaggcaggttttggcttttagttaggaatttgttatgcatttgctatgtgatcaggcacattgtgggtattaagaatgagtgtaggtgctgggcactagtggctcaggtctttaatcccaccacttgagaggcaggcggatctcttgtgagtttgaggccagcctggtttacagagtgagttccaggacaatctccaaagctacagagaaaccctgtctcaaaaaaaaaaaaaaccaaaaaaacaaaaaaaaaacaagagccaagacacactggggtgggcctaggccctatcccaaaggatatgaaagactctgatgacaccctatggaaggcctcaccatccagggggagcagaaaaggtatgtgacagataaggttttagttgtgtggggggggggctaggggaggacggatgggagaaggaaactgggattgtcatgaaaaataatcctgtttctaattcaaataaaaaaagttggaaaaaaaaaagagtatgagtgtaggtaaataagatgcagtttttgcttttagacagtttgccttctgttttgacatgtcacagttgcttgggagtggagctttggccttcagtggtgtcaagagaagcctgagacttgttagagggtacatctgatgttttaactcctgttaggttaaactccttctttcacagaggaatatactaagattttagttcctcctacagaagagctgacccaggtgatcagtttcatctcttgggagtgggaatgtgaccaggtacagacctctaagtctactagtgagggagtctgaggcaggaggatcacaaattcaagatctctctggcctatagaatgagtttagggctagcctgggtaactagtgaacctctgtttcaaatccaaagtaaaaatagggctgggaatgtagctcactgggggcctagcatgtataatatcttcagtcccctatagaacaaacagtgacaaccactgagaaaaatgtggacgtgattttcaacctctaatacatttatgtatgttgcaggtcaaggttgttcagcagagctctgtggattcatgcactgccataccagaaagcctagagaagtctctcacagcctgtaatgttcctgggagaaactctgcggagagccccacggaggacttgagcattaaacagggctaccctgcttccagcccagctgctgggcctaacccaccaatcaatgaaaactgtcgtgtccaatgagatgtcagggttctggaaggtggcagtagtcaaaacagatacagtagtcagtagtcaaacctgcctgtgaggacttgtcttgagcaaagagcactttataattgaatccttatgctctatgtgtggccttcaggtctccgatatgtaagatgggaaaagtttggaagcacttcttaccaattccttgttcttaaccacaggtgtaaatggtagtggctagagcttgagaatttgctgcaatgaaatggaaagcgccacggtgatttgtgtgaattttacatgtaaaaaaccctgcaatgatttggtttaggatctttttgtgtaaagtgttggcgagaaatagttgatctaagaatttgagctgagtgacataagaacctgtatgagtggtgtgttcattctttcagtgtgtttcataaccttctgctcatataactaacctgttgatgtgtgtggggcattggagtgtgtatttatttgtaattagtttgattgttacagacaccctagaggtggtgtagatcatgtttacgtgcactgtgtttttcttgttaaagtcatcatagttctttggtatacattgctgtatctggtgatatattaaaatttgttctcataaaaatcttttttgtaaaaattatttcctaaatataaaagtgttgtaactaatggcaccacatcatggtgagatgtttgaacaattggtacatatctttgaatacatgctaccagtatgcttactgaatatgaggcatactttagaatgttggtcatacagatggtatgagaatatggatgtatccaactatttgataccttgtgctcattaagtcacatcggtaaaggtacaaggatgcaatgtttccttctgtcagttgaaaagatggaggcatttaaaccatatgaaataaaacattgacttagccccagtaccctgaataaggataaaaaggttttcggggatttaaattagtagataatttaattcttggctttcagttcagattggcagccaagccttcatggtcattttagattttaaagatgtctgtagcaagtagttccatgtagacaaacttctttcctgccaaccagtttccaaataactgacacacaaacttaattataattgcttggctattggctcagacttattactaagtagctctcacaacttaaattaactcattaatctgtgtgataccacatggcttgggctttacctgtcctccagcatgtcttgctccctctgcatctcctgttgactcctatgactccgccctccccagcattctctgcctaaccattggccaatcagctttttattaatgagagcaacacatatttacagtgtacaaagattgttccatagcagttccactgttggaagataaaccactagcttaagctgaatggtgtccatgtcttgagagactgcagtgtcaggccagcacctttaaggaatgcctccggtgacagatctggcacaggctgttgctgaatattttccagggtcctctttttgtaggtttcctcagctcctttgtgatatggaatacttccattaccagaagcaatggatccatgctttggttgagtgtcaagctgggggtaaagaatgatttgttagttgctgtgaggagcatgttggcatattgacgatggttcttaaagtgatgtctgaatagaatagcacaaggctttcattgtcaaacaccagtagtgcatgggcacattcccgagcttgctgtgtatgggtgagattgtaagaacagtctcactgtgtatcctggctgacctggaactcatctgccctcttgtgttatgataaatctttctgccaaaagccgcctgagccccatcgccacgtgtgagctttacggcagccgcctgtccgagttaggcccaaatgaatacacagaaacttgtattaggttcaatgctgcttggccaatgtctaggattctcatctgttagctcagtcttaattatttcaaatctatatattttataagacttatcggacgccttattggcgtccctccttgccggtggctcacatcctgccactggaggaagcgaacgggaaaaaggtcccttcctgtttctccttcgcttaaatatgagtttccttgctatgtcacttcctgcctggatcatcacttatctgctacatttcccagaatcctctttgactcttagtcctgcctaacttgctgtttcattggccaaacattattttatttaacagtcaataagataaacatacaaagaagtacattccccatcactcttgtgtctctgaagtaccggggttagaagcagatgccaccatgcctggtaggtcagcacttaaaacttgactatctgtgaccccttttcacatgagactgtgcctggtatataaaatagtatataactcagatgtctgctgataaaatgtaaatttattttagactggggatatgactcagtgttgattgtgtagtatgctcaaggaatggagtttgatccctgtgctgccaacaaagcaaaaccaaacaccttttcgtatacatatgatttgaccatttttctcaaagaagcaaatttgcttcccaaggagatgaatgggtatctttattttacacaaaggacaaaatcttagctgagcatctgatattgcatgatgtaagagaactcagtgtttcccggcgttgactgacacccccattttataatcactagtgggtaaccctgcttcacataaatatgtaacacaagatgccacaagtgtatccagagccatttctatgcgatctgaagccaaaatccatttaatgagtgtgtgtgtgtgtgtgtgtgtgtaacttgagttaaacagcattttttaaaaccaaacattttggagttggtgagatgcttcagtgagtccaaacctgattacctgaagaggacaagcttggaaaagttactctcatctccatacactggctgtgacatgtgcacccaaacaagcatacacacacccaagtagaacaaatttaaaatcaatcaaagataataccaatttgatacatgctgaagaatgaccataggaaaatactaagtctcttgtttgtaagccattgtttttataatagcagaaaccttaatgtacattgtaaaaagtgtaacaacactgccatcacatcatgtaatagtattgaatctgaacttgttgtgtgttagttctgagctgtcagtgttgtgacccctaaccccaatgttgccacccacatttttaaaagctgtgcttaggttccatagaatagctaggtggccctggtttatatggctcattgtctttggaccacctagcctgaaagttagcccaccatttaaaaggatagcagttatttccctgtgaatatggaagttggatcctaaaaatggctaacactttagtttttataatcagaattgttcatagttggaagcatgtgtcatgagtttgagctacatatgtgatgaaaaataagcatgttggttccagagtctcataaagtgcctgagttacaaatagagctccagctgacttacatggagaaaaaaatccagttcagagatctggggattttagttttcatatacacagttaagggcatggcatggtggaaagaaattttccttgagctggaactgaaatggcagtttgtgttcatgcccgttgtccgggctcccctgggacagcatcttcagtgagggagtaacatttttgcgtgtagcctgattccttaagaattcccaccccaacccccaggtgcgttcaccttcaaaatgcatttgcattttctcacttgattccaagttgatctgccttttcagtgctgttaagttcccaggtgttttaacctggaaagctcaggcactcctttgagtctacaaggggtaatggattgagtctgcaaatgacttctaactactttcagggatactttcccaggttctttgaaaatcactcaaatgctagcaatatgtcagaaaagtaatttgagtgggagtctagtgactggtccctaccagtctcaggttcacaagctccatgttgttcatagtgctcttgtggttggaggattggggtgggtgctgtattaaagagggaggacactgaccacctggagttcgcaggtgctagttgtcatttgaggatatttgaattgtgatctcttccccattatttggataagctgtcttccctttggagtaaggggctgaggactagaacaggtcaggcacttctaggctgtaaaggtcatgtcccgttccaccacagctgtccatctaaggccatgactcccctgagctgtgactcagccttttgtaggaagtgaaagtacatctcaagtcttctccgtgtgtcatcaagtcttacctgtgagctccacgctttgggctcctttttgtagctgagacgaaataggcactgtgggaactctgactcgtagtcctgggccatgtttgccattgagcgcatttcccatcaaccttgcagaatgtgggttactctcacgtgatggaatatgacgtatattagttacttcctgttgctgtaataaaacacccaacagaaactcttaaggtttattttgacgctaaatgaggggctgtatttcatgaccgggaagacatggcagcagggtcatggggtgaggtgattgcaagactgcctatattcgaattcgagtgcagcaaccagaggaagatgtgtggtgtcagctttgtgccttagtcccctgagatagggggtctcactaaacatagagctaggctggtgaccagcaagtcccagtgatcctcttgtctctgccccctactatactgtggttactggtgtgctattaagcccagctttttatgggggtgccagggatttgaactcaggtcctcatgctaaggcagcaagtatgcttgcccactgagtcatttgcccattgttgtaatttaagaaaggtggttcgtgagagaaagatgccatgaaacagggttcaagcagagggtttataatttattagggaaagggatcataaaaggggaaagggaagtgaggagacctgcctctggagacaagagcaacaggagagaggagagaggaaagttggggggagagataggggagagggagagaaagagagaagaggatgggaggtgagcagggcccctttaaaagggaacacagtgaatgtgcacaggtggtgctcttagtggctgcagctgagggcgtgtcctgtcagaaccccaaggacagacaggccagtgcagatgcctgaatagtaacatccctccctaacttttaaaaacactaaagctagaattgttaggaaaacatatgttccttcaatataataggttagttttagatcaagttctgttcttcaaaagacgactgtataccactaaacctggactttgcaaagtttaatccctacagatttgtgtatagcattcaattgctgatcatgcaaatgagccacacacttttttttttcattttttgtttggctcattaaaaatatccaaagaaaacaattactgcaattttgcttaaaaatgagttgtgctctttaagttcaaatttaaattggttgtttagaactcagaatagatttccttatagaaacaatgttgcagattgtacctgaattgaagtaaaaagcaaatttagctcacaaaatgtcaaaatggcaattagatttgtggcaactgcgtaaacctccattcataatgttgtgaaaaacagattttaagaatgaggttgcctgagactcattttgctttttgtaatctttttttttctcccacaatgtgcccccacacttctcttccttttttgtgccagttcacaggcgtagcataatggtctcaagatagacaaatgggatgcagactcatgtctgccaccttgccagctcagcagctgctgctccagaagggagcaatgtccttaatgtgggctctgacattgtagccaaaagcaaccccctactgctggcgtgtctgtgggtattcacagaggtggcttttctgttggtgtgacactggcatgtctgcattcacctggaaatgacatactttgttggtgtggtgctggtgtgtccgtacatacatgtggacatggctaatctattggtgtaaaactgcagctgctgttctttctccgtctccctctcccttcacctccccctcctgctcccccccccccgtgtgtgtgtgtgtgtgtgtatgtgtgtgtgtgtgtgtgtgtgtgtgtgtgtgtgtgtgtgtgtgtatgcaagtgtacacagtcttggcttattttggtggtgttttaggaaatcacagagatataccttaagccttgtatgtttttgttccctggtggattgacttccagcccacagaattcccgatagcctggcaggtgaataaggctattgtgtttattcttctgcctcaggggtctctaatgggtgacccagaggctgatgtgtaaaaatcatatttgccaaacctggtccatgctatttcaaatgcactattttattcatcccctatgacctgggttctgtttgttaggcagatcgtttgcttttaaaacaagccagagaattgaatcttgttcccacaacccagaatgccttcccttttcctttgattttaacattctgactatacttgggattgaacctagggagccaggtaagcattatacatggagcctcagccattattttacttttatctttgtggttatttgaagtgtggtctcattctgtaatctagaatggcctgggtaggatcagactcctggcattcctcttgttggcatcccctgagttctgggatgtagttctaagtcatcatatctgacccagagctttccattatttatacataccacctcaatagagagtaaatgcctgcagatgtttaataaccttcttgcttgcctggtaaattcttttcacaattgcattttagacctgcagggcttctgttagggatttacccaattgatacagttgaaaatgtgacatcttgattcccagcaaaaatatcagtgtagtaggaatggggaattctggatctcctcattggttttctctggtgggagaatggataggtatccccagtcacaggctttctagcaaagcattggggcatcctggagcttttgatgtgagcagaatctcttgacttgaaatggcagcttagtcacctagcagcggcatggctgtgttcccacagcttcctgctagatctcgaagaagtccttgggccgtccacacgaagatggatttgtcttaggtaccatctgcttgttgttttagtgatcatctttttaagagtcaagccagcagaaggtcatggaagtacttttccccttccctcctgtgcttagctgatcatggatagcctgtgtagtatgctcactgagtgacctggcaatcaatcgcctgggacgcagagaaggagagaaatgccattgttgtgacgggtgaggtgagtgtaggctgtgtctttctgaaacagaactcagggtagaggatgaacatcagaggttggatgctctgtgtgtgatgctaacacagactcagtccacatggaaataccagatatgcttaagcttgcattttacctgtctttgtggtgggactgatatttccagatttcaaagcaaggtcttattgagaagatttactgcaattgcatctactaatctgttgttttgaaaaccagaagcccaaatttgcatcctaaatcttattccagcacatgaaatgaaatgagatggttttctcctttgagttggtcataaactcacttaagaagagaacaagctggcttggaagagcttcactctgatttcccaagtggctcagagtcagtggggagattatttgagccaaattcagccagttttaaaaatcacccccaatgagaacaggctttgttgctgtggcagagagagtgcccatccgactgtcacttcctcccctctccttgtcagagctgttcagatgcttggcatttcaccaccccaggataattagcataagccaattatggtgatccttctcttgctgtggctggttataatgaccatcccataataaccaactgggacctgcaaatgaggtgtttccagaaacatggagaacaccagatcagaaagactagaagggcttgggtcctctgtaatagtcagactgctagaaaacccttggatttgtcagcatgtcaaaaatgttaaaaacttaaaatttctctctctctctctctctctctctctctctctctctctctctctctctgtgtgtgtgtgtgtgtgtgtgtgtgtgtgtgtgtgcatgcacgtgtatgcacttgtatgtgggcatcttggaagcaaaagagagcttcagatcccatggaactatacttaagagctggaactatttttcaaagcattttcaaagagcaaattcttttccttcactcacagacttgctgatatagtgacaaatactgttctcggagattttgtcagtctgcactcactctttctacagtttctttgactttatcccggcacagtaagggagcactttgaaaacctgtagtcctagcctagttggtggcacactcctttaatcccagcactcaagaggcagaggcaggctgatctctgtgaattcgaggccagcctggtctacagagtgagtaccaggataggctccaaagctacacagaaaagccttgtctcaagaaacaaagaaagaaagagagagaaagaagaaagaaagaaagaaagaaagaaagaaagaaagaaagagaaaaaataaagaaaacccgcagtcctttgcagcccagtaaccttcctttcccaggcctgccatgaaaagcagttctgcctaggtgggaatagggaacatgcctaaaacttaattttagcccatgcatgaactcagttacactgcagaatccatgaagaaagtatgtaataccgtgctggccagatggttcagcatctaagggtacgtacgtggagtcaagctagacctcaggtccctgggcccacagggtggaaagagagaactgactcccaaaagttgtcatgtgacctccatgtgtacaggcatatacaaccctcaaatgtaattaaaaattttaagtatgtaattttctaatgcctcttaacttaaatcttctatgtaacttatcactcggcccattgtgttttcccctaaacacatatggtttattatctatgttgtctttatcactttgaaactgacagattaagatcctgaaggaaaatagttttctcagtaccacacccactctcctcaacactagagtccaggcaccctttcaaacagagcaggtgggtagccgatatgaatggcagtaaggagtgacagacacatctgggccatgccaagagaactaggtcttgagttgtatgcaaatggcctttcactgccctgccttgaagaccaggggcagtactggctgaagtcagtactggatttcgttaggttggtggtttatgacaagaacagtgcttgagagatcacagagcctcttggattctgtccacaggctttctccaaagtccaagcccacactgaggtaacttctttatttcaaggcttctcatttatagctctcagacatggcaatgagtcatcttacagtttgtcagtcagccttttgttattgtgataaaacactgaggaaataatcttaatggcttgtggtctcagaagtttcaatctgttgtttcctggtgccattgctttgggtttgaggtgagttgcaacttcgtggcagcacggctgtatggcagacaaggctgcttacctcatggaggctggcaagcaagagaaaataggggtaatgcctcattggcacgccccaaggaccacactctcttctgctaggttctgcctcttcctgtcacagcggcccagggatttatagagacatcattaggttagtctgtcaatggagccagacccctcatatccagttggctcctccaaagcaaccagctggcaacaaactctttcttcatggcattgggtgacaattcagggccaaacccaaacacatagtctggacttgaatattaaacaaaaatcctgagatacaatctgtcggaattttaaggactcttagatttcttccctttacatgggcaatctgcttgaattgttggctgacaagaaccagaatgaagtaagagggtgagtctgtccagagaagtccttcatgtcatcttcagattgcagtagacgaagctccgcccctttatagtccgagactgttaaccgtggacggagaagttgagtttggaaaggaatttaactgagaaatgctaacgcgccactgaagatcaagtacaaagatggatgaagaatttgcactggtcactagaaggtgattttcttattttgtgcgtctgtgagtgtgcactcaccatgtgtggaggtcagagggcagcttgtaggagtgacttctctccttccaccatgcgggcctcagaatttgaacatgggttgtcaggcttggtagcaaaacctggtgctctccaagcaattttgttggcccaaactattggattttaaaagtcagcttaatagtaataaaaaaaagaaaagaaaaaaaaagaaagaaaaagaaaaagaaagaaagaaagaaagaaagaagaaggcaatactgattgcaagttcaccctagctttaaacattctttttattcatagaagacctatttggagtccacctttctcatgcagtttttcttgacatggccatggattgaaggcacttaccacatagtcccgagggaacagctgtttgtgggctccccctttatcctcttctccgctgttgccattttcaagtctgaagagaatacacatttgcagtgtcttttgtcttctggcttcaataaagctgtccgcttcacgcaggcatgcagtttatacccataactctggcttaggaggcagaagcaagaggatggccacacgtttaaggccagccggacctgcatagcaagtcacatgctggccaggacagatctaagacactacctcaaaaaaaatgttttttccactttccatttcaacaggttcctaggccctccaaaaacataaaaatagttgagccagggagttttaaaagatttatttattttattctctctgtgtggcaattttccctgcctatatgtctgtgcatccgatgtgtgcagtgcctgtagaggccaaaagatgtcaagcccctagatttacagacggttgtgaactcctgtgtgggtgctgggaattgaacccaggtcccctggaagcacaaccatgggcttaaactgctgagctgtctcttcagccccaaaccagggtgttttaaaatatttgttgttaattgataatgtatagttggttttttttccccctctttgggggcccactacctagctcctaaataaatacatggagacttattcttacttatgaatacccatccttcctttggcttgtttctagccagcttttctaactttaattatcctgtttctcttcaactatgttttgcctctgggctttttatctttctttatgctctatatctttctttccttcttactccatgactgactgtgtgttaggctggcccttagaatccccctctcttcattttcttcctccttcccgcctccctagatttctcctcagatttattctttctgtctgccagccctgcccatttctctcacctgcccagctattggcccttcagctctttattagatcagtcaggtgttttagataggcaaagttaaacaaatgtaacataaaagagtgcaacacatctttgcatcattaaacaaatattccacagtataaatgaatataacagatcttaaactaatattctacaacaataatgagcttgactgaggttggtaatgggccaagaagacccaagtgatggtcagtaagaaaaacaagacaaacaaacaaacaaaaatatccttactggtccaaagatttacgggtcctttatggaatttaaaagcacaggtgttcatgagagcctctcctaaattcagggaggtcaaacactcacttgaagtgaagccaggcagagggaggaagatggcataggaagttggactctagtcattttctgtgaaccccactttcccttctctgaaacactccattcagtggagtcccttggtgtaatgggcaagaactctctggagctggctcccattcagcagggagggggtctcggctgccaaggatgactgaatgcgacatttggaccctgcttctctgttggtctccatctgtctctctcttgttttcctttcccctgggctgcacccatgactcatctgttcctgaccaggctgacttatttgttgttgattctgagtatggctttgactctctaccaagaaaagcaagcctaacaaaacaccaagcttctaagtacagagttatccatactctcttcgttttaggcaaataagaaagtggttcacctatgacctcaacagagttgtgcctcaaataccagcttaacctttcatcatgtatagtgttttttcatataccattatacacttctaaaaaaaatcacacaagtaatgagtgtccatcagtgaaaacttgggaagcataggagacaattctactactgggtcacttggagacaatgtcctccctctggctctcactctgtccagtttgctactgtttcttccgttcactctgccttaagcaagtcaagagccagggaaatattcttgcctcagcctgtttcatgccttccccatcgttagttacccaggactgataaatttgtcttctacactcgactccgcacgcctctcttcacgtcctttccccgccaccttctgtctttttccacttagtggaccttcctgcatccactggctctcggtatcttggatgctgctcttcctctaatcaaactcaaccattcttcctcttcctcccctctctctgtactttctggtacagtactgatacttgattgaatgcatagtggtaggttttgtttttaatgatcttaatgccccattctctagctcagactgatttggaacccctgcatagcctacaactgctctcaaattcatgacagtcttcccatttctaagtagtggaattacaggtatgtgccaccataccccccttaagattttaaattgctgacatgctacctggattccagaccacaggacagtagtcattactacccatgttacttgttttctgttcatcatgtgttactttcattattttattgcttgttttattatccacacggttatggggcataccccaaagttctttttagatttgatatttcctagaaaagagtgcccagcatgcaaaaagcttcaggaagtattgatcgcccctggctgaatgtttaaaaacactgaactatgtaattgctcaatgtctgtgtatagattccccccccccccaagtggaaaacaacagtataattgtcttttggaggcgactctggggtcagatgtgttttctccacattttatttcagcagacagcgtagcattcactccaacctaatgaaatggtttccatttccaaacccacccatccctccgcatctttccaaagcattctcactcttccttgggtgccttcctgaccttgccttgcctgtctggggtaagccccacctcctctgcagtctgttgaccacctcctgtgttgccacttcctctcatgatgacacagtggtgattccaagggtagttagtcattttgatcacaaggcgacaagtgtttgtttatgtgtgtcccctgcctcctcatctggaagagaaagaagacttttgaagatatcgtattatcatattctatgctgagacccagcaggagaggcggtattataaattctgaaaagagactcttgtgcccttagaaatcatttttattaatcctttgagaatttcatacaatgcatttatcatatttaccccaactactcccctaacttctcctaacttctcccagatctacccatcaccctgcaccaccccgggatctctctctctctctctctttttaaaataacccactgtctctaatttgtgctgctcctgcacttctagccatggagctgtctcctggaatatagtcagcctaccaggattcacgcctttaaagaaaactgacactgtctctccagcagttatctgctgtccatagctccccagttagtggtggggtctgtgggcccctctcccctccacactagaacactgactggcttgatttggtgcaggcctggtgcaggcaaccacagcgctgtaagctcatgagtgcctgcctttggctcttagaatctttccacctcctctaagatggtccctgggcctttggaagggggtgatcagagactcccacaggagtataagactccaaaggagctgacgacttccaaagggaagatacaaaaggcgtcactctgcatccatgaaaggaagagatctagagacaggaactccgttgggtccagactgggcgggaaccttatgtccgccatctcaaaacacctctgagatcttctctgtcaaaactggggattgtgaagatggaatgtcttctactccattttcctcaggtccaggcttgattaaaacgctgtccccataacagaggcagggacaaggaggaagcctggggcccagtcacctaaccccagtcactgtctaaactgcctcccagctgatctgcatcacttctgactggcatctcctggttctacagactgttaacaaccataggcacagtggggaggaatttaggtctctccacgtcattagtccagactaaattaatccctcttcctttactaatttctatttcctcatttcctttggaatagaaagaagcggaggccctcgttctgtgacgggtgacagtcctgtgcctttcacagccccatttcaggcgcagtctcagcctgcaaacattcgttcctgattcttacttggactacagtggccttttatggtattgggacccgagaaggtgggaggagcaaccttccaggacttgacacgtctagaaaaggagtgagtctgcacacggttgccgcatctgactgacaggtgggtgagtggctcacggggaagacccacgtggaaactcagtgttctagaatctgcaggctgttcttgttatccaaattaacactactgagtgaaacccagtatcagtcttgtccaaaaatcagactgaaaaggtcaaggacagagtcacagaatcctgtattcaggagctcccatctgctccatctttcctttcttaataagactttatcttaaaataaggggggggggtgtgtgcaggagagatggctcacaagttaagagcactggctgctcttccagaggtcctgagttcaattcccagcaaccacatggtggctcacaaccatctgtaatgagatctggtgccctcttctggccagcaggcatacatgttggcagaatactgtatacataataaataaataaatctttaaaaaagactttatatgactctgcaggtacaggaagaaggggtcccgtgaagaaggggtcctgtgtgtacagtatgtgaagaaccttacaccccagatagggtgtcacctgagttcaaattgtctgtgaggatcaggtcttccaagtgacttttagaaggtatacacaattcctggcaaacgggttaatcggcttgcctctttctggagacagggtctcttctggaaggtctgtctggaggctcaggccagcctgggactcactgcattgctctattagttacttagtttattgctgtgacaccatacctggcaagaagtaacttactgtgtggaggaagggtatattttgtttcatagtcagagggccagtccatcctcggggggagaggacatggtgacagcagcctaggtgactggtcacactgcatccacagtcagagagagatgacgggtgctcagctcacctctttctattgagtctaggacctcagcatataaatggctctgtcctcaggcaggttgtgtcttccttcttcacttaagcatctctggaagcacactgacacacccagaggtgaaactcgctctcaatctaatcaagctgacaatatgaaccaatagctcagactgaccttgaacttctgacaatcctgcctcagcctccggagtgctgctgggattacaagtgtgaacctccactcccagcataacctatttaatgataagactgacttttatttccagcatttctttgctataaaacactttctacaaaacctcttatcccctgctcgcagtcacaagctttgtgaagaaggcacattcctgcttcatgtgtggccctggctgtttcagcggctggtagttttggggacactgggatgataaaaaggatcaggccctaatggtccctcctgtcctggatgctgactctggtggcagcagcattgaggtcaattgatttgttacctaactgatctttgtgctcattgctcttctctgctagaggacagggcacaaggggccctccctctaggctctcaacagcctccaactctttgttcatctggcctcaaaagcaatgccacttgtcattgccgcagcatctgtggattctgtcttctcgaccctcagtccttcaggatttatttagcaattctttatatcaaacctacagtctaattaactagcactgcttggggaaatctcactgtggcccccatctctgctccctggcccttgtgatctttctcgatagaattcagacacacagagcacagtgtagaagaaaagtggagtgtacccaccagtgaaaggagcatgggtgacagagaggtggctccgttgaaccgaatgttaggtaggatttatgtatctttaaagtttctggaagtcgaggggcattggtggcacatgcctttaatcccagcactcgggaggcagaggcaggtggatctctgtgagtttgaggccagcctggtctacagaatgagtgccagctacacagagaaaccctgtctcgaaaaaccaacaacaaaaaaagtttctgaaagtgtattttttcctgcaggtggttgacaaacccacttggattaactcctgggagaaacaatgatgtatgtctttgttctttactggaaactccccatacagaactcttaccatctgagcactgtctccatccagggccagagattcaactcagatcccattctttgggcttagaatctggatcccgctgtctcagttcctggttttccaagctgttgatcatccctggtgacttctattgctgatcccccagaagctacagagcagagcctcttcgtcttgattggaccttgactgatgagcatcattagactgtctgacatagttggtggtaaggaaacaaatatcctaaggtggacacagtggtgcatactgagaatcctagcaactagaggctgaggcaggaggattgtgacctttagaccatcctgagctacatagaaagactttgactccatgagccaaacaaacaaatgaatggattaatgaataatatttgaattaaattttttttttgtatttctgccaaatgtgacaggacaggcttgctcaggactgaagatgcaaataagcccttcccttctgatgcttccaaatcacaggagggagccacacaggacactaagcatcctcagccctaggaagctgcagagcctcagactccctgacccctgttggagtggagtggccctcctgggagaatcagaaactgatttaaatattcatctcaaccattgctcagcaggagcacgggtgcatttaggggacagatgccttgacctgaagttgcctgctctgaagtcaaggacccttctctagctgcacctacccattgtgggcaacttctctaattgtttttgttaaggacggtaaccatgaactcatccatacatttaataggatacagaggtatgactgagttaggggaagaagagagtacaatatccttcacgtgacacttgcgctggggttttcttctgaatgacagtcccggaaggtggctttttagtttgtgttctgtagatgaagaattggaagtctttggggtgacttccttagaatcgctcagacttcctacttaggtgtgttgaatcttaaacccaaagcctgtgcatagtaacagggaagattagctgtagggagaattggaggttctttctttctctctctctctctttctctctctctttctttctttctttctttctctctctctttctttcctttctttctctctctctttctttcctttctttctctctctctttctttctttctttctttctttctttctctctttcctttctctctttctttctttctttctttctttctttctttctttctttctttcttctgagacagggtttctctgtattgctttggaggttgtcttggcactcgctctgtagaccaggctggcctcgaactcacagagatccacctgtctctgcctcccaagtgctgggattaaaagtgtgtgccaccaatgcccagctgattggaggttcttttagctaggaaattccttatgattctgaagaaaggaataggtttagtcttggagatacaaagcctaatgacttccatgaatttttagtagactaatgggtatgtgaatgggaggggaagaaaggagaggtagaagataggttagccaagtctaatgatgtatgaagaagctttataaaaccacattagtttgtaagttaacaaaaaagaaaaattaacttcaaataaaaggagctccaacaaagtgccctgcatgggtgaacaatactgttcttaaggaggtgggttgggccagacatgtctcacctctcttatgagctattgttggtcagcgaggcccccgagtcatccaaaacaacacaggcttttgtcattgctctagattactgtggtggctgctcttggtcctcaacaaacctggcaagagggaactcagttgaagaactgtctccatcagattggcctgtgggcgtgtctgtggctcattttattgattactaatggttgtaggatctgctctgtggtgggttgcataagaaaggcagcagagcaagccaggagcagtggactattaagccgagcttctccgtagtcggtttcagtttctacttcaagcacctgccttcagttgcggtcttggatcccctcaatgatgcaccatgatccgtaagttagcaggaagcagccccttccttctcatctctgtttggtcagtattcgatcacagcaacagagaagcaaactaggacagttgccccctctacccaggtgataaaacctattgctgaagacaccacacagtttgctcattggcatagagaaatcaatctagagatgaccaaggcacgctcttcctgctggctagcattcatgatgctaggatgtgctatgctgacactgggggaggaaagatagcattaatcttacctagcactggaccctacatgctataaagttgacctgccaggcaaaatgttctcactagtgtggtatcgacaagactgtttatggggtaaccaaccactctttttgtctggatttgaggactgctgccaaggagggaattcataaacagggtcaaaaaaccacatccagggatctcataggcccaaggggagaacctatggatgctgttttgctaaatggtcattttgtcaaactgccttctaaataagcttatatccatagatttgtactgctctcagccttggtcagagatgccgctttgtgtgtgtgtgtggttagtggttaatgaagagactcataactcttcaaagtgctgacactaagtggttgtgcttactcaggcatagatgggacgtccatatctaaccccctcccacacaggctcagtaaacatcatggactacgtgtcttttgagagctggtcttgctacattgttcaggctggctttgaactcatggcaaccctcctgcttgacctccctgagtgatgactccccaaagtctttgttcatcgccagcagggtgccttggctaagcttgagctgctgttggtacatcctcaaccctctttgggacaggtcttgctttgtagtcgtggcaagtttggagcttgctgtgtagatcagtttcaccttgagcttcagcagtccccactcctgccttccaagcacagggattccaggtggacgccacaagcccagcctggtatcgtcttgttgactgaaatccacagccgagtcaaagatgttctttgattttccctcacaccccctttcagattactgtgtcacatctgttgttgcagcccctcaggctggtgtcagccacaacagtctctgagactttgtgtagttttgacacctactgggtgatattttgtaggagggccttctgttgaaatttgttgggtgatatttctcaagaataaactggagtctccggtttgggtgaagaaggttgcagaggcaaagacgtttccgtcacgttgtgccaagggtacatgtagctgtcatggttttgacggttgccgatgaccaaatttagacactgctgggtgggcatctccatcactgcttcaccctctccacagtgtgctaggtgcaaggcccttgtgcagcctgctccagaggagttgggggcttccttcttactctttgaaggctgaacatctagaattacttgggtttcttttgcatgagatgcccatttccccatttctctagtcctttgtgtgcatctgtgtggactcgtgggtgtttgttttatacttggggttctaatccagtgtcattttatttctaaatcatttaagctctggacattgggagatcttggaattgtgtgctgtgttccttcaacaatcctcggtagtgtgaatctacgtgtgtgtgtgtgtgtgtgtgtgtgtgtgtgtgtgtgtgtgtgttgtgtgtatatgtttgctgtgtgcatgtgatgtgttgtgaatttatgtgtgtgtatatatatatatatgtgtgtgtgtatgtatgtatgctttcttgttcttcactttctggccacacgttgctgcaggatggttttgtatagtttttgtccttgtcccagaatcagctatttctccaaggagcctgggtttcttctactggaaaatagtgttagaccctgagatttgggtgctccatgtgggctgataaacaaatgacatttttaaaagaaacattgtagaaatggaatgcacagaatgcatgtgtatgcacccccacccacacatgcatgcatgcctgcaccctcactcctgtgtgtaacccatctgtacctatgtgacgtgagatgtgtgtcccaccactccgtctgtcacctgtgggctgttactgcgccctgccctggctgtctgtgacctcccactggacagcaaggagctgtgctccccacctgtcacctgtcacctgtcacctgtcacctgtcacctgaccaccccacggccatacacccatgagctgcatcagaactagctcagatctctggaggagcagcagtgtcaagcagtgtatgtttcttacccgcctttggtctcgtgactctttgtacagcgacgaatgttcaaatccagccctttccccctctctgcaatgaggctgtttgctacatgtggaagactatttctcaccaaatctaaattctttccctgaagaccctgactgatgagtgataagtaacataaagcaacaacaacaacaaaccaaccaaagggaaaacccaacaacagcaaaacaaaaaagctgacacatccaattccccttgtctgtttcaatgggtttgggtggacatgcgtgtcacacgcctactgctacagcatctcaaagaatagtttctctggagctggggatgacctggtgaacaactgttgcagacgacctgagttcagttcccagcacccacatcaggtgcctcccaactgcctgtaactccagctccaggaacctgatgtcctctctggcctccacaggcttctgctcacacacacacacacacacacacacacacacacacacacacacacacacacactcacacacacacacactcacacacacacacacacccccacataatcaaaaataaagtaaaagctgttaaaaaagagacagttgcacttcccttctccctagctccgaacttgttttttattttttacctcccccagctctgaattgtaacagccacttctaactaaccattagccatgtctaacagttttgtattttctaaaatgtcattgtactagtttatttttatttttgtggttatccataacaaaacccttgaggcaggcaaactttataaagaaaagaggttagtgtgtctaatagtttgggaagtagaaagacacaacaccatcattggcttagctctggtgaggacagcatgtcagattatctcataatggcaagaaggcaggtgggaaagtgaagtcacatggctaacaggaagtcagagtgacttgtgtgtgtgtgtgtgtgtgtgtgtgtgtgtgtgtgtgtgtgtgttggtgtctcacttaacaccctgctgtgtgagaactgattcagggtccatgggagatggacattttctttattaatactcagacttatttttttaactcactccttcataaaatccttatgtgacattttcattcttagggatgtgtcagtaggttacaagaactttgagcgtttcagagatggaagtaaggactttttatgtaatattggagttctctttgcctatagatatgctttccaaagtccaaaaaaaaaaaaaaaagacacaaacaaacctgcatgcctgggttttgggttccttgtggagccttctctttcttttttcccccagcttggctgcaggagtgaagatgtatttcagaacttaggaaatagtcactggtgatgaacagctgaccaggatttgggccaacaactgtcgctccttatgctgtactctgactgtgttaggctttgagtaatcaatttattctaatataaaccatattggatggtgagagttttttttaatgactttttatttcctttaaacagtctccagaaccaattgctaattattctggagcacagccagcctccaaggaccacaggagccccctgtggagatggggctcctgacacttcagctgctttgctagtttaggcagaaacaacaagaaaatcggatgcaaaatgatcttcccatttccttctggtggtgtgagcctcactagaaacccaacaggaaccttttgaaagatggaagtcttctctgtaataaaatcttcctcttcttgctttagtgggcctatgttttaggtaatcaaagagcaccccagatttaatattcaaattccataataaacagcagttgtggggttgaggaaagcccatacagaggggcagaggggtagtctttggagagttgtcacatgaattgacagtcagctattcagagggggctggggcttggttgtgtgaatttttagatctcctatggaaaaggagctaagaacaaaagccctgtcctcaaactgagtcatcaaactgtcattaaacagaatattttgatatggagcaagacaataatgtcagtggggtagggatgggaggtgtctgaaggtgctcagaggtggcaaactcaaatagctaccagaagcaggcaggtgacagacacacagggcacctattgacagtgctcacccactgacatggtaccgatgattggagcagcacgcagtgggtcctcagtggcatcgctgtctcctttatcctttggatgctgagttgctctggagggaaaggagagagggaaggaagggaagagaggagaagggggagggagaggagcatggaaggagggaggaagggaaggtgggagggagggaagggaaagaaagaaggaaagaaggaagggaggaaagaaggaagggaggaaggaaggaaggaaggaaggaaagaaggaaggaagggaggatggaaggaaggaaggaaggaaggaagggaggaaggaaggaagggaggaagggagggagaaaggaaggaaggaaggaagggagggaggaaggaaggaaggaaggaaggaagggagggagggaggaaggaaggaaggaagggatggaggaaggaaggaaggaaggaaggaaggaagggagggaggaaggaaggaaggaaggaagggagggaggaaggaagggggaacgtatgggcactattctgagcccgtgctctgtctgtctgtcctttgtgtccttggcagaccttggtctttcctttgagatgtattttgtttgcttctagccatccctagccctgtgacgtgggacaagctggccactgagtgacataaactctgtctctggtcttagactctctggtgtaactcttgagtaaggcatctttagactctctggtgtaactcttgagtaaggcatctttgaagatgcttccaaccagactccctcaagtcccccaaggcccatgtgagcatctcctgcatccttgcctgtgtggaagcgtgctccaccccagagctgcccagcttctcagaaggctgcttctcagcaccgctgagccatggtgcagcccctacagcttctgacattgcaccccagatggatgctgactcatggagcagactccagagtcccacaccagtttcttcccatctgtggatgagtcaggccagggggcaacacagctcctagttccagcctctccagagagattcacattctttgccattcagcccagctttacctctccaggttgatggtgggatcggaggtgacatggacttctggcttctgtctttgcaagtctgggaggagcctttggagtctgttattttgcagtcagcctggggtcagacccagacagacagaatggatctcagtttggcctccccgctttcaactttaaaacattgcaaaggagagtaggtgtcgtcaggatgctccagcccccacgctcgcctccttcctggctcagagccttctgtgtctggctcccccacttgggatctcagctcacaatctttcctgtctggttgaaagccggttcttccgatgacttctcagctcccttttcttcctacattattagtttgttatcacacatagtcacctgctgtgtaatggcggagatgcattcattctgggaaatggcatttttttttgtctgtgcagttatcacaaagcaacactttacaaatctatatggtttcctatacacacctaggttctatatacatgtctaagcagcacaccgagtagcctatttctcatacggtcctggtgaacaaaacagcacaaagttaaatcatcatactatagagaaaaggatgcaatcaagagagcagtgaaccagggctggaggcgtggctcggtggttaagagcacttgttgctcctgcaggggacccaggtttggctccagcacccacacagatgcccacagccacctgtgactccagtactaggggatgcgatgccttctggtcaccatgggtaccacgcacacaggggacacacttacatgtgtgtaggtaaacactcatgcagtcagtccatgggaatctcacctgtgtagtgtttcgggaaacacaaagccaaccttagtatcctgaagctgagagatgcccccctaaatcctcgagctggaagaggcccccctaaatcctggagctgagagatgccccctaagtcttacaatatacaaatctggggagggagtacgtagactggcagtctgactttgtgatgtaagcacacactttggaggtggatggatcagaatacaatcttgcttcttccacttcaaaacttcgtaatattgaatttcatcaaatttctctaagtctcagttaccttgtaattaaaatacaaaagtggtgctaagtgagtagggccccctgtgacaatgtcatgacctcggccatctgatgtgaagatcccatgacctttggatatcacatcatagaagaggagatatgattaatattgttatttataatggtgaactcacattagtgagctgcagacatgattatttttcagtataaaattcatttagactgtctctgttccctgcttctctcaagtcatatttatgatgagggatttctaggacacgatgtaagtcagactacaaacatggagagtgtttgggttctgacaacgcatggactaacctgcacatgaagccccacccacaaaatcacactgagcgtggtactgaatgcatgatgtaaatcaaagggctcacactatttcaaccaaactccacaacagaatagctctctcctcatacaaatgaatctcttactttcgaatctgcagagcattaatgtgacgttctcggtatttggtttcctgggaaaaatgtttatattacattggaaattcagatttccactcagtggatttgcatttagacattcttcctcttgcatttatgtctctgatggaattgtgtgtcccttcacctgaagaggggaaggggataagattgatgaggacacctgcaagattgcatctcaattgagaaataaacccagtgactgccttggcctggagcatcctacccagtaactcccgaccagcgcgatcagcctccaaggaccagtgtgggaagagcattctcttgcttcagtgtttggacagcgctctctgtgtatgtacatttgacacaatgttattttcttgtttttccaaggaaactaaataattgaaatagaattcagctttatcagtgtctatgaatgtttaagtaatggctcagctgtcatctagatctgtcaccagcttgctcctgaaattcccctgatgcacctccagagtgggggtggtagaatgccagaggagccatgttctgattgccatcgagccctgtggcctcaggtagatggagcccctgagatgtcttgtcctctttctgtgtgaccccttttctgttaggtcattgagggttcaagcccctgttttgtctccatacacctatcccagacactggccaccagaaaaggggagatagggactgtacataaaggagatctttcttttccttttaacattttctcatacattatattttaagccctcccccaactcttactagattctccccacctctctacctaccaaacttcatgttcttttaaaaaatctttctaaaaagcaaacaaaaatttaaaataatataaaagcacagaaaagaaaaaaagccaaaacaaaacaaaatgaacaaagaactcacaaccaaacaaccaaccaagcaaagcatatgaagtcagtttgtgctggcccataactcttgggcatgggtcctgtcctggagtatggtttttgtgcccattggtactccattagagaaaactagttttccctttgctgggtgatggcttcttggctagggtgaggccctgtgtctactttcctctctcagtgctgggaccctgcgtggcttgaaccgatgcaggtcttatgagtgctgctacactctctgtgagctcatgtgtgcgtgagttctgtgtgtctggaagacactgtccttggtgtcattcaccacccctctcttatagtctttcagcctcctcttcacttagattcctgagccttgagaggagtttatttcccgcctggtcccacagccactttgcccccaataaacacacaaaggcttatattaagtataaaatgtttggttgatgtttcaggcttcttattggccagctctgacttaattattaacccataactactaatctatgtatttctacatggccttatcttaccagagaattcctggcgtgccttatcttcccccgtctctatatggcgtctctcttgtggcttctctctctctccttactcactcctctcatagccccctctatcttcctgcctgttactggcgaatcagtgttttattcatcaacaaataagagaaacatatacacagaagggcatctctcatcagggttccatgaagacatcccagttagagttgagtgccccgatgtctatcggcatgcgtcgcccagttgtggctccatgttaattgtttctgtaggtgactcaaccctgtgagggtgggtgcgcaagctgcctgggaagaaggttcggccacatcactctcctctttctctttcttgcttagtttgctttcttagagacaaagtctcattgtatggcctgggctggcgttgaactcactccttctgccttaacctcttagggattacatgtgtgtgccaacaagcctttcttgctaagggagcttgaaagccttcttcccttcacgcgggtgctttccttcttctgttacaggtccatattctctagggctttgattttttttagctagtatgccctggctggcctagagtacagtaccccagtgtgtgcaggctttgatctgtgtcgttggtgctatttggagttgtgtgtgcgcccaccacctaggccgacttcccaccacctaggtcgacttcatggaagggtaacagtgtaacagaaatgtaactcggagcttggatgtcctggcctaatgttagcattggtaactaacctccttgttaagctcttatgcttcaatttagaaaagactctgccaggagtacaaaggattttattagcaattcccattttaagatgcaccaaggggtctgggaacacagcttagttggtagagggatgacgtagagcagatgaagctctgtgtaaaccaggcatggagctgaatgcctgccatctgagcacacaggagatggaggcacgagaatcagaaagaagttcaaggtcagcttctggtgtatatcaagttggaagctggcttgggccatggagtccctattgaaaacaaaacaaaatgggaaaaagtgtcatggtgcatgaagtgcccagcctttaaaggagaatatggatagggcaccaccattcctgtctcttagagaacccgggtgttaggacaagcccccccccccaacccatgtgtcttagagaatctgggcatgagctgtgagaagaacatatctgttttagcaggagactgctggactttggaatgacctggggtgaagacacccgacagcttgttagatttttaaaacacccttatggagaaagggtccacatgttatctatggaactattgaagccttatatccagcggtctttttgtcaactggaggggagaggaacctttcccaagcagatgtatgaacagaaattgcaatggaaaaaactggctggattagtctagaagaccaggctttcagggatcccttttcttcttcattatcttgagatgtaggactcatttacttccgacagacaattcagagagagcacatgaggccattcatgcagttccctccatcttgtagaactccaggacagcatccggtgggggccctgcagtgtgagacaggggaggcttagaaatgcctgttaccatgggaacctttggtacccccctctaaacccagccattctccttctgacctctgtccctctttgagttcctgcagtgatgacaagtttgcagtgtcaaaccttctgggaagtatttctcccccacattattctgtgggctgttttgggcaggtggttcctttgaattataactctatggtgtggacacaccacagtttgattgactgtccattccttgaaggacagctggttgccccatttggggtctgttttgaatggatctattaaaagcaccagcgctttaaatttttgggcggtttttaatctcgctgggatgaaagcccagggttccaagttaaataatgggcagttgtatgcttggctccagaatggtctcagtgtttgagatgtccacgagctgtgagtggctgaccctctctctctctacagcctcgccagcactggatgctattgttgcttttcattttagcagttctgtgaactggtattccattgtacctgtactttgcctttctctggtagctatcgaggttattttttcacatgtttatttcttagccatgcatttctttttcctggaactcactttgaagacctggcatgtttggcactcacagagatccacttgcctctgcctcaagtgctgggattaaaagtgtgtatcaccaagctggctttacctgtatacctttgatgtagctcctcttttgtcctgtttggctttggattctatcatctatctatctgtctatctatcatctatctattcacctatctatcatctatctatctgtctatcattatctatgtatcatctatctatctatctatctatcatctatttatttcttcatacatgtgtgctatatgatcatccttcgttagagatgtggcctgtacaatccttcctctactctgcagtttgtgccttcatgttcttagcaggtttttaacaaaacaaaatacaaaatgaaacagaagcatgggtggctggtaggcagtatggaagctgggatcagtaagttcagtttgaagcaagatgatgagatgataatagccctacaagtcttaagaccccaaacacaaagctagaaagaaaagacatcaaccaatctgtagttttctgtgtattctcagttctgggaaactccatggtactgggatatctttggttacaaagaaagacaaagtgtttctccttttgagaattttctgttcagttccacagccatgttttaagtggggtacttattttgttaatgtttagtttttagagttctttgtatgttctagacatcaatcctctgttggatgaatatctggcaaagattttctcccactctgtgggttgcctcttcagttgctggtgttccttttgctgaacagaagcttttcacaaatccgtttgtgagaaacaccaatgagattctagaggttatttttaaactaagaatgtagaaaacaattgattctgaaaccacttggtgccagctgcaaaagacaaacatgaaaccaaagctctgaaatccggtggccatagcctccctcccaggtgtagagttctggtaatctgggtgagagaaaaatgccctgtgaggtcatatgattattttaggacaacacagaaccatgttgaaattgctagacgtgtcaagttgcgatctccccatggagaagtatcacctgctgagagtttgctctttgtgtaatttatattcccaggttccccaggggcctgtagcctttcatatacttgagatgtagtgtcaacttcccaacacaatgctcttgagaagccacagcctctagtttctgcaggaaggtgttttagaagaatgagtggccaggcgtggtattactggccccgggtaattcccgtaatgctgtgtttgagaggacaagcctgactttggaagttctgggaagtttttctgaaagataatctggccatcagtttcacaagtaggccgtaattgcagctcaggcttctccagggaaagcacatgtgtgaactccaaatctttaagcctcttcccagccttgtttgtaataaaacgtcccgaactataaactgtcaccagaataagcttgatttatcctctccccagttaactgttttcagggaaaatagctaatgccgggcagtgagactaacaaagaaaagcggatggactgcagttggctaggaaactttctgcacaaggcacagaattggaaagactcatcatttgccttcaagttgcagagaagatttaggagaaagtaaccatatgtggctggttaccgagttctgaaaaggtggtgacagccaacagcgaacagctggatacaaacattgctcagactagcaggacattgtcccatcaaagaagacaatattggtatctggtaagatggcgcaaagggtgaagatgctcagtaggcaagactggaggcccaggtttaagtcccaagacccatgtaaacaaatgtggaagaagagaactgattccacaaagttgtcctctaacctctccacatgtgcaccctagcacacgcaccttatcctatgtaatgcataaaataataataataataataataataataataataataataatcagtaaaaagaaggcagtatttatttgaatggagcatctgagtcagaactgtaaattgccattttctagggcaagtgtggaccatttcctatggctcagtctctacagactgctgaagtcgacggcacctagtcatctgctctttttattgatctatttgtctgtttttgagacagagtctcatgtagaccatacacaaactcaatatgtttctgacaatgaccttgaaccctgctcctcctgtgtctatctcccaagtggtgggattacaggcatgcaccaccctgcctgccctttgatgttcttaaatggtaaattcttaccctgctgtcattgtagtcggagagcagagatgaggtgagaagagaagacctagcatggccagtcacatgacctaggacacaaaagagtgaattctgtgcagtggaggacaggccaagtatcaaacctttaaggctccccacctgcatctgtgtacacagatgtattcccaggtacatggagccaggagagcctggacctatgtgtggtaacacaccctgcccctctggaaatgctgctactgaggagccctctcccccacttcagtcacctctgcttgtgttgttcaagtctgaactggagtagctgagagacccctgcatcgctgcggtgaacgtgggaggtggactggcttggtgcagactgcaggttgacagagctgtcatggggtggaggtgctttgagtcccttctgagggactcaaatatttatttatttgagaacaatttatatttatttgcagaacaatttcaggaaatattctattttgtttttcctgttgtcaggtctgtgcattgaacctacttattgccccggggtggggggggggggggaatggagtttttccctctgaaatgcaactgtttctggaaggggctgttctatgtgttgcccatgttagttttaaaaatcaggcagtttccatttggttggtttgtgtgtgtgcatgcgtgcacttttcagggtatcactaagaagcagatcacagacctttgaatgctcccaaatgtggaacactactgcacacaacagggaggcattggcccaaatagtcatccatttcctttagaggacatgatatttgtccctgattgaagagggtgaacaaaagacacaaagatacacattttgggggagttattttcgagggaatctctttgcaggggatagctgaaggaccaccattgcatgcggtaaatgaaataaaaaattaacaggcatgaatcccaaggaaatacatccctccatcctgggaacaggggctgcctttgcatctgccttgctgtcagatgacatctggagctaagccagagagcagaaggatgataaatgttgaaaatcagcatggagcatccccagccaggtgggagagaagctgtcagaactgagagcagctccagaggcttggggagcagagctcgggtatcggaggcacactctcctttctacaaagcctcttacggaaaagaactgatcttaaaagattttgttgtgttctccttaagactatattctgtccactgaatgctattcaggctcaacttgaagcaacatccccagacagatgctctacactaattgagacttcatgaagagtctaagatcatttttgcacttactgcacttccagtgtgtagattatgatttaacttgcataccttgcacacatttcactcctgcatacccattgtgcaaacagaaaaagatacataagagcaggtgtcagtatcctgaattcctctgtgaataagaatgccactgagtgactacacacacctgtagttccggtgttgaggctagatcattgtcagaatgttgagctcagcctggttacaaagtgagactctgtctcaaaaagtaaaagtaaggcttgggctgaggctccatctataaaattcttgttgtataaccttgggggcctgaatctggtctcccaggagccacgtgaaaggctgggtgtggtacacaccataatccagtgctggggcagtggacaggagtgtgctggatggttttatatcaacctgacacagagacaaaggagcctcaattaagaaattgcctctgtaaggttgggctgcaggcactcctggggcattttcttaattagtgattgaggaggacagctgagcccattgtgggtggtgccatccctgggttggtagactctggttctataagaaagcagactgagcaagccatgaggagcaagccagtaagcagcaccgtccatggcctctgcatcagctcctgcctccaggttcctgctctgccttgagttcctgtcctgactgcctttggtgatggactacagtgtggaagtggaagccagataaaccctttccacttcaacttgctttggtcatggtgtttcaattgcagcaatagtcaccctgactaagacacaggacgatccctgggccccttggccagttagcctcgcttattcaaagaggcccagggaaaagtgagagaccggggctcaaaataccaaggtggactgagacagatggtacacaaggctgacttctgtttccacagacactgcacacacactgcacactctccacaggagccctcatgcgtgtgtacacactcacacacacacacacacacacacacaccacaggagtaacatattctaatgtcccagtgaacaaaaggaagggacaactgcccaagcagacagaaatgctgatcaccctttgtcttatctaacaaagtaatgagctgatccaaaagtgcagtttggaccccgtaagcaggtgcagttactatgcccataaaatatttctagaaaaagaccttatgataaatcttttttaaaacagaatccacccgattctttcacaagttgagtcactttacaaccacttgctatcatttcagaaatgtcttttgcttctgatctagtaaccagaaaatgtccaaactcagatcacatgaacattagtagaaaatcttgaggaagaaatcaccaccaagatcagaataaattgcaatgattattttagataaaatcaaattggttacgagcacatttcttcaaggtcagatttctggttttatttctgagtggcctcatttatgtgatcaaaataagtgcaaatatccatctacacacttctgggtgcatttgctgatcctgcttctctcagccatgcaagctcagtgaagtttggggtcacgtctcttccttgggcctacctaccatctaccagagagcaggcgtgctagtcatagctcagggcagctgttccgtcattcatcctcacagtggggctgcagcctcttcctggatcatctgtgtatactgttcattttcatttatttgaccgacttatgaaatggcacagatgaaaatgctttttgtttttaatgcttctagcatgtccctgctctctcccctttgataagttaccctggcttcaactagacaatgcaggggagtggggaggtagctcagtggctatcctggcttccttttctgtaagaaaaatgccctgaccaaagctgcttcagggaggaagggtctacccggctgcaggtgagtgcagtccatcacggtggggaagtcccttgcagcaggagatggaggtgtctggtcccttggcttccacagtcaggaagcagagagcagcgatgacggttatgcccggcagcctgtctccttttcactcagtccatgaattccaccccaggaaaaggtaccacccagagtgtgtttcttcccagcccagctaactttattaataacaactcccacaggtctgtcttccgggtaatcatagagctccctgagttaacattgaggtgaactgtcacagtgggtaaaacgcttactgtgcaagcatgaggacccaagtttggatccccagcacccacaaaacccaggcgtggcagcatgcatctgtgatcttagtgctggggagggaaagacctgctcactggctgaattagaggagtgtagtatctggggtttatctctggcctctctataggtgtgcatgcagggagggagagagagagagagagagagagagagagagagagagagagagagagagagagagagagagagagggagagagggagagagggagagagagagagaactgagccctctatgttgcaatgaaaaaaaaaaagcacaagagagagaaagatgccatgtgacagagttcaagtggagggtttttttttttaattaggggaaaaggattgtaaaaagggaaagaaggggggcagcctcaggggatatttgtagtgggaaagaggaaagaggcagagagagagagaaatagacagagggaaagaaaaagaagtatgggagatggatagggtccttttaaaagggaacacagtgaatgtgcacaggtggtgctcttggtggcagcagctgagggtgtgtcctgtcaggaccccaaggacagtccagtgcagacgcctgaggactaacacgtgtcactagcacgtcttaactttgatattcttctgtgctacgccccagcctccatgagtgttcactggatcttgattcctttcttcctaaacagaattgtccccattgactgcacgtcaaagcaacacaagagacgtttgcacaccagcgtttattgcatcaccattagcgttagcaagacctatgctgtggaaccaacctgggtgtccagcaacagaggggtgtttgagggaaaggtgacatgatacacaatagagtttttcttttcagctgtaaaggaaaatgagttctgctctttgcagaaaagtggaggcagctggatgaagatggaggtttctgtccctcctggtcacacagctgcttcaccccaaataaacacacagacgctgtattaattatgaaactgtttggccaatggctcaggattcttattgcctaactctgtcttaattattaacccatttctattatcttatcagagaaaggcccagacctgttaactcttccttggcttcatggcatgccttcactgtgcctctctcctacttttctccttgtctggtagccctgcctatacttcctgcctggctattgaccaattagtattttattcatcaaccaataagagaaacacacacacacacacacacacacacacacacacacacatatatatatgtaaataggcacccccatcaacaagagataaccatatgaagccaactgagcatctcagaaaggtaactattatctgttttctgttttttgtggttcctagatttttagatacatataatcatgtatgtatgcatgtatgtatgtatgtatatgtatatgtatatatgacatgacaatagaaacaaaaatatctaggtaaacgaagggaactaacaggatggataagggctaaggaaggagatcaaagtggaagacccctcatgtcaggagtaattagtatttagtcagaaacatgttacttggaaactgtggtaagtgctcctcctaaatatgtatctattctttcccagaggtgagctgagatggaaagggatggttggcccccagagctctagcatcacaagacactaagattctgctctaggctagcctaggaggcctggaacagatgtatatgttgaaatcacgaatttgaagtattggagtgggtgtccatttgttgtttgacttgggctgggactcctaaagcagtaggttgaattacagaagtaaggagtttcctgggggtgactggagcagcagagacaacaacatggcaggcccatgcccatcagtagggagggctttctaatgtgagcagactctgtgtcatttaaagtgactgattctcaaagagattgcttaaagaaatggcactttaaacaaaacacagtaaatcataaaaatgagtttgagctggggcttaaacttgaaagtaaatttatggaaatggatttgttttatcttagaattcactaacagagatgagacagctgaatcttagtgtgtgtgtgtgtgtgtgtgtgtgtgtgtgtgcatgcatgtgtgtttatgcctgtgtatgtgtgtgcatgtgtatgtgtgtgtgtgtgcatgtatgtgtatatatgtgtgtgtccctgcacatgtgtgcattgctggtaatgaaaccagtgactccagggttttgtgtgtgtgctcagcacacactgccacacatgtcttccccactactgatacagctgatgccttgggatcatcgtgtcttccttatgctcaccctctcttcccacctgcctctgctctttctgtgacctttatcttgaattttatgcttatcatttccttgatttatccatatttttcagttttagtactgtcacttctttcaatattttattcagttctgtttgtctgcggactttaaatacaaagatgatgcagttacagtcttctgggacttgcttattcccctcaaaatgttacaacaacaaaaaaggccacgctgcagactgtggctctaattccttcatggcccctgattgcattgcatcagtgtggcgaagtttgtttaatcagtcctcagtcgatgtgcaattctgttgtttccagtttcttgtttgaaaagtgaggctgtaggcatctccatctctacgagtttttctctggtgggatgagtgtctaagggtggaacttccggcttgaaagctgtgcgtgtcttcagctttatagaataatgccagcatttgacccaagtgactagagctgcttgacctgcatcactacagcctctgcccattcgagatacctacattttatcaccaaaggggatctcactcagtcttggtttgcatttctatggtttctcgtaaggctgaactgtccacattcttgattggttgcatgtaattcttgtgaagcccttctgctctctgagcttcagttttcatgtgtaaaatttaggtgatagcctattttgtgtgacctcgctgtgcctggctcacgtctgtccttaacagaactcattttttctttgttcttgagcatactctgttttctcacgctccctttagctctcccctgccctctccttcctcccccctctctttgtcttcacatgggcttcagtcccgtgttcttagctcgggttctggagtctatatgggtcttccaagggactggaaagttactcttgttactctgttggcttctgagaagctgatttgttgttgtttggaccactgctctcacccctcccctatttgttatcccttgtttgccccacagttgaatgatctctctcagaaagttgttctgtctccttaactggggactcctttctttttcattttcttttttaaaaaactttttattttagaaacagtcttattttacatatcaatccccccattccctcgccctctcatcctcccatgttccccacccacccccatccactcccccaaggatagtaaggccttccacaggggatcatcaaagtctgtcacatcatttgggggagggcctaggccctcttcgtgtatctgggctgcaatagtatccctccatagggaatgggctcccaaagtccatttgtgtactaaggataaacactggttccttttttagaggttccatagactgcccaggactcctagctggcacccacattcagagggcttagtttggtccaatgctggttccccagctttacgactggggtccctgtgctctcactagtcaggtcactgtctgtgtgggtttcttgactggggactcctatgtgtgtgcttctccaccacgctgcatccccagcccctcacgctgtttctgctgatgtgttggaagtagttttacttgatcctcaggccacttctgttgacaggattcccagtcttggatgaactcttctatgttcttttggatgctacagctgctcctcagacctgcctttctttgtcagtctctgctgtgggctcagtttccccaaaacttctctgtcaatcgcccattctggagtcagcttccagactgcagactgggctgggagaggacttctgtgaacaccagtgacatttgcatctgggctgaagctttgttctgtgtgggcctcctatgccagggtgcacagggtaggggtgctggctcactgaagggcatgctatgatccaacacacccggctggactctgaggagctgttgactgaactccaatgacagtgatgaaggagctggaggagtgctgatctcagaagtttctgaagggtttttttctactctgggtgctaatggtccggttacagtaaaccaccatgttgtcttctgaggtcacatttcctcctgcccgttgtctgtctggttcatcaggccgtttattcatgagtgttttggggcaccttccctgtgcagcactgatgaggggatggatgaaatggcccgtacttaaggagctgccacagctgaaatcaactgtctaaataaaaaatgacaaatggaatgtgtcccctttgactcactgtctgctgctctctgtttcataaatgagcacttttattattatttatttattattttgcttctatttttcactacaggaagtaaatcttagtactcaggctatctctctgtgtgtttctctgtaacactcttcagggcaaagcttctgaagtagagggaacttcaaagtcagaccctaggcttttgaagaggctccaccctgggacagtcttcaagaaaacagaattacacacctgtccttctgtgctccacacatgctagagagttgacaaatagttcctttatcaatggctaaagaattcaaaccaacaaacacagtagcagagtggcctcaccgaagatccaggagtgctcaggaaggctgtgttgtgagagactagtggacactgctgtgtgggagtgttgatgaaagcagccctttccgtgggaggggtggtttggtagacataagcctgcctgggacaccagtgcaaacaaagtaagtttaagttactcaaagtaattcagtaaatcggcctttgaagataaagattaagaaaggtagtacaagctagattattcagtttctttaacccaaaacacacaaaaaagcaaaaaatgtcaatggacctattgattatgatgcaagcaatttgcagcagtgtaactctgttacaggttcttggggcctctaaggaaggtggttatttagcactttcagatctcatgtgtatgggtgttttgcctgtatgtaccataaacatgatttgtgcctgcagaggccataagagggcattgaatcccctgggactggagttatagaaggttgtaagccaccatgtaggtgctgggaattgatcccaggtcctcagagagcagtcactagtgctctccatcagagagcatctctctgtcacttaaagctctttaaacagatgacacattgatcaatgtgttggattggaaagggtctgaacacttagtgtctagtccccaagtaagtgtgaaagggtttgaggcatggggggaaatagtccaattattattgtgttgcttatgccatggcagaggacacaattaagagatgtcactgtcagctgctcgtttgtttgccacctcagtgcagaattgttactttgtcactgggtgatgttctttccatcctcttctccagttctaaaactgtagtgaaggaagtaacactttattaaaataattttgaatcattctagcttttgcatgttgggttcaaaggaccagttgccagcattacagggtccagcttgtcccctgtccagcccacatcccaaggagtctgtgtgtgcttgctcatggggaaagacatttgtggcaaccacttggaagtgagctttcatgaggattgttctttggtatctacttaattggaagtcatgctttatcactgcattgatctccctctccactgtgtgtgtgtgtgtgtgtgtgtgtgtgtgtagaccagaggtcaacctcagataccttttctcagacagtccaccttgcctacttttttgatacaggttttctgattggcttaaagtttagtctaccttgtttgttgaaacagggtctctgattggctcaaagctcaccattctgggtaggctggtcgaccagcaagccctagaaatcattgctctcctcttcattactgacatcacatacagtcttttccttgagctctggtgttgggactcaggtccttatggcagatcagactttctctaaccttgagctgtttcttacaggtgttttgaggctccttatatgtaaggggacagttcctatgttcaattccctcatattaaacaaacaaacaaacaaacaaacaaacaaacaaacaaaaattcactttgcaaggaggtacaatgaatatagatgcattgtgacttccaatgcactttgtgacttcagtattttcactgagctctgttagaccttttgccaatacagcacatcccttatgttatctgctggtgatgatgtaattaatgaaacatagctgccattctgaactccactttttttttttaatagaacatagagtttatttgggtttagggtttcagagggacaagagttggtccatcatggcagagaaatgggtcagtaagagcaagaagctacgtcatcacatcttttaccacagatgcaagcaaagagagtaaactagaagaggtgtgtcttagggtttctattgctgtgaagagacaccatgactatggcaactcttataaggaaagcacttaataggagtttcagaggttcaacccattattctcatggtgggacatggcagaattctggagaagtaactgagagtcctacatcttgcaggcaacaggatgtcgactgacacattggaaggtgccctgagtgtgtgtgtgtatatatatatatatatatatatatatatatatatatatatgaattatcaaagcccaccccacagtgacacacttcctccaacaaggccagacccattccctaggagattatggggacaattactttcaaactaccacattccactctttggcctccataagcttgtaacaataccataatgcaaaatgcatttagtccaacttcaaaggtccccatagtctgtcacagtctcaacaatgtttaagtccaaagttcagactcttctgagattcatgcaatccctttaccataattctctataaaaatcaaaatcaaaaagcagatcatatacttttatcctataatggcacagggtacgcattaccattccaaaatgcaaggaagggggcacagtgaggaaatactgttccaaagcaagactgagaacaagctgggcaaactctagactctgcatttccatgtctgatgtcgaagcattcttcagatctccaactctttccagctttgttgactgcaatgcacttctttctcttgggctggctcaactccactttttaacatcttaggaaagttactgaagttgcaatgcaagctttcatggtgaatatttcctgagtgtcttagaagctaaaaactcgaagtctggagtctgccaacttcatggccccaatgatggctgccaccaacagcccagctgagttgtcacctattgtcaacctgagttgtcatctgttacagtgcttgtaacagatcttccccagagctcccttctcagactgatcttctgttagaccaggtggaccaacttcactgcattgccaaagaaacttccagaatgccagctggtcccattgaatggccatttctatactcagggatgccctgagtttgctgtgccctacccaggtcaggaagcaccttgttcaaggaaaagaacagtgattgcaattgtccccaaattaaccttccaggacaggcattagcttccctttgcttcttttcttcctcctctaactcacaatggaactctttgtgcttgggcctttagcagccaaagaatctaaaaatagcaggaaagggcgccttgccctcagatcttggtcctccaaggtcatggacacctctgtgtggacacagcagggcacttatcaccgcagagatgaagtgattgcacttgaactgtcacaagacctctgcagcataaatccgggcaaggaagacggtttgatgcattcaattgccttggtgtaagcatttggtaaaaatgaagcgtcttctttctgctaagattttatttttctgatcatttacgtgagtgttcctcatgacttctgtctgccttagatgcagggtctctctctgaacccagagctcaccaattggctagagtcaccaggcagtgagctctgagtccatacctctatgctagggcttcagatgtgtgtaaccaaccacacctggcatggattctgggaacccagactcaggccctcatgcttgcacggcaagcccttcttcatcttggctttcttcccaggcccattttgttttctcatgagctaggtacacctttaatttttatttgtaaaactaagacacagatgtactgcttaactctttaagcagatgtgattgtagatatcaactatttctttaacaactgtggttctatttcgagggagtgcttagagtggggttaagggttggggttttacctttagtggtttgtgtgtgtgcgttagtgcaggggcatttgtgtcaacacacaaggtggaggccggaggacagctttggtgttggtccttgccttccattgtttttcagcagggtcacttgttcaccattgtatataacaagctagctgatctgtaagctcctgggaatcctgtactctctgcctcccatacccgtcagttctgggattaaagatgcaggctacctaaccttatgtgagatctggtgattggaattcaggtctttgcccactgagctgtttctcctgcccactgataatgttttagtaatgtacacctacacaatagaagtgggtattcgcagaaaatactaaatgataaggaaaacgctcctgacgcaatgagaactaagaaccaggggacaacattgtgctgccgcctgaaaacaaaacaaaacaaaagaccagaagaaatatggtactgcgttatctccggaggggctgttcggtgtgtttttaattttctctttgtaccttggagtgtttctgacattagtgatccatgtggtactttaacacaggaaagatcagttagaaaacaaataggtttccttctgtccttgtccttaggcaatgagggtaccattatgtccagctatggataaaatgtccgcctcactagtctcttcccctttgtcccatcagtgatttccattcatccaaggggagatggcatcagaggaggaggcccctttgaaaactggccctgaaaagagaaaagaggggaaagagaatgcaacagcactggaaggacctgggctgggtttggaattcctgcctccctgccgtgtctacacaggcagattctctctgccgtgtctacacaggcagattctctctgccgtgtctacacagccagattctctctgccgtgtctacacagccagattctctccaggtccttcctcactagctcccctgctgtcctgcttctccattgtctcctgcttctccattgtctcctgcctgtctcattgtcttcctttctctgcccttccagaactctgctccttttggtccaggacagttcccagacctcacctactgtattctcagaggcaagcttgtaaggggcaaactaagctctcctggcctccagggacttcccctgcatcagatcctctgaggcttcaatgcaagggcaatgggcctgtgtcagtcacttttattgttgctgtgacagaatgcatggcagaaatgctgggagaatttgcataaacactcatctactttatagggccttaaaaggtccaatttttaggatcaatgtgtttattggggttacttacagagcactggtgaggtgttacttataggagcatgagtgacccctaagtgagcctcaccagaaaacctcacccagcgtggagatggtaccctcagagttggatggatggaaccttcccttcagttaatcttgcctaggctcctcccaaaaccatgaggctgcatgaacttcaggcagaataacatacaaatgactaggtggtgaagaggatccactgcagtcagctgagggttcaaccaccctccccacccccttctcctaggagggaatgtcaacagtcaagagccagaccctgaagggaaggcctcttgcaagtcttcacagctgtcctcatgaagaggactactgctgggctctgaggagagtacaccacagcataaagcatctcagggaaggagggtgggaaggaaggaaggaaggaaggaaggaaggaaggaaggaaggaaggaagaaggaagggaagaaggaaggaaggaaagaaggaaggaaggaaggaaggagggaggaaggaggaaaggaaggaagggaggaagaaaggtttagagtcatcttctaagcacagcccttaaggcagggaaggcgtgactgctggagcttgagacttggtttaatgacagttccagtaagaaataagagggcggtggatgccagtgcccagctcacttcctctttgttgttcagtctgggaccccacccctgggaggatgcagcccgtgtttttgtgtatcttctcacctagattaacctagtctagaaaccatcgacagacatgtcgacagctttgtttccaaggtgattttagagccactgagcaccagtgttaaccttcacaaagctggctgattttcttcttcttaaaagtgcagggaaaaggcaggattggaaataaactttatccaaaaggtcaatgacatgtcctcagagaggggaaaaaacgaaaacaaaacagggaatacagtgtttccatttcattttgatttttctctcagtataaagcaagctctagaccatcatctgcccgagtctttccagcaccagggttagatacatctacacagtcaggatacaaatacgagctgggaaagctgactgcatcaaaaaaatgaccacagtccaggcacatttggatttgtctttctagacagctctaactcattacataagcctctataattcctgtcttcagagcttaaaatgatgggaaacagcccactcctggtgggggtgccagcaccagtccatcatcccttgggactaagggtgccccaaggcttacctgccaaatgtagctgggtacccacctcacccccatgcccctgtcaatgtttgcttgttgcgtcaatcaccattacattaggaattcttcctgtattgttaattcagcaccgatggctgcaatttacagagagtccgatctttgaaagtcttcccatcaaactccctagagaaaacaaattgtgtgtgggggctactacaaagcttaattagactccgttaattgttaatttacacctaaaacttgattgcaaatggcatccaccgtttcactaataagggctttgagaaattacccagatgagatccacacaattcgggatggactgtttgaaagtggacagttcggtggcagttagcaaccacaatattgtcagccagtcgccatgcagctgcagaacagtttttttttttttttttttttttttttttttttttttttttatacacacaaaactgccagatgctaaaggctcctgttttcacagctcctgaaccgcccatgatagctcttcttggctgtcaacttgcctacacctggaattaagtaaaaccccccatatggaggggtacaccagtgaagaaattttaattaatttcaagggggaagattcacttctaatctggatctttgaggtgggaatacaaaccatcctgcattctgttggagcctatgtaaggacatgcaagaaggaagattttgctgtttgcctgcttgctcttgctctcactagcaagtccagccctgcactggcattagagcatgcttctttgggattccagggacactaaagaccagctgagacatccagtcttgtgggctgaataactactggtagccattgtttgattagctggaccatatcctgcaaatcattctaatacattccctgtctatttatattgaaagattcattctataagctctgttagtctggagacccctgactaacccacagccactctgcggttttgtctattgacttacctactttagatttcaggcccatgggtgagtgaaacacaaaccccgtcgactcttgcttcttaacatgatgtattgaagatttgtctaccctttagcacatagcaagactattgcttttatttttttggatatcactccttcagaggacattccactcatctgtccacgaatatttgggttctttctgccttttggctgtcacatcagctttctttctttcattataacaaatgtccaagacaatgttaaaaactaaaggcctatttttggctcctagttttcagtgcacgataggctgtccttgctgttttgagtcagagaagaggtagaggtcccttgactcccttgaggacgtgtcacctgtgactcagagaccaccccacttctgaaaggctctaccttctctgagtggcctcctgggaaagaattaaaggagaattggggtacaccaggataatattagatatcagccttaaatggatgtgttttggggaagcacctgttagcatcgtgacccccttcttatatctcactctgcacatgtgcacaggttgctatcagagaaaacaggggcctcatcccccattttcaagcatatccacaatggggctaaagagattgctccatggttaagagcatgtactgatcttacagagaacccaagtttggttcctagcacccatgccaggtggctcacagtcacctctatctccagctgcatcttctgatgccctctcttgaactctgtgggcacctgtatcatacacacacaagccctcccccatatacaaataattaaaaaatacccaaaatgaacactctagttaatattttcctgatgaaacgttttaaattctaactccccacctatcaaattaatccattgccggctgagtaacagactactcctggagagagcagcataagtcccaaggacatggatctacatattcatccatatccattctgcttcagctgacctctgaacagctcataatgacagacttgtgactcttctggatttaaaacccggaaagaactctcaagtaaacattgcattttaagatgctgattttttccgaagtagtgggttgaaatggttccgattttagaatctgtaattcacatctctgtttttcaaacagaaacagaaagagcagaggggggaaaaagccgatttcattagcatagctgtgcaggttctctgctttcacagccagggagatcatcgtgaaaggttaaacgacttggaaatttacagacccttcctatttcatgtcccattctattcttttcccaggagagggcatcagagatggccctggttgttgctgctgctcacccctgggaatatcgggagaagaggaggacgaatagttatgctaatatgtgctcagggggtgtgaataacacagaagaaagatggcgtgagtccaatacatatgtcagttttagtaaaatactgcaagtcagcgcgacatacacattaggggacagtataggtgagtttataattatgatgtcagttttagtactgaagagacttagagaaaggagatcttttcatgtgggctaagtgaaaaccgggacagacagaatgttctagaacgttgtcattgacaagccggtagaaatacttcaggggccaggaggagagagacatgctgtggtccaggtggtaacagtaagtaaatatgagtggtgacctagtgatgcacttggcctgtaacaggggacctggaggagggtctcatgggaagggttcaaagcaaggaagaccctgttgagatgtttcagggagagaatggtagtttaccaaaatagctaattgttttgcatacactttttttttctaccaggtaaaatttggaaactatatttaatgtgaggatatcagaacaagtcatatgatcctgtgggctgggtcctggctctagtgattgatagctgtgcaatcttgggacagtgatttgctttgctgagcttccataggtcctgggaacctgtctgatttctaactctcttgcttcacatcctcatattttccagtattgcaagctgatttctatattgatccataaactttgggcttcattcctttgtttaggctaaggttttaaaagacatcaaacatcatgtcatatcttgaagccaggctccctccatcaggatgagacatggtcacaacctacaccagggataaaaggagaagccattttgttccagtgtgctggctagcctggtttgggttgtgaaacatactttttaccggaagaactgccttgctgagtgacattctctttgtgtgttcctttgtgtgggacacggattatttgtttttaatggcactgatatggcccagccatcgctcctactaaactctgatatttcagccacacactgagcttccagccattcgttctgtgtgattatttcccaattcttacttttagaaaaaaaattagcatctattaattatacacgatagtgacttctaatgacaatgctatgcatgtatataatgtatttttatgctattcatgccccattgcttccagctactccccctttatttttggtgacccaccgaattttgttagggtggcttacaggagcatagatcttactgactgactacatcactgaagagactgtctcttccttctgcctagtagctgttagccacatacagatcttcagggaggagtggggcaccatgaaccctgcccgagtttcttagttgacttccagaaccctcctgtctctaatttgccctcacgagcagctgactaattgctatgcttttgtagaggtaggaaggccgctaattccgtctctgccacctggctgaccaagataattattattactgacacaccagagtatgttcagatgatggggatatgaaccgtaaagatcctggaaaacatgtagcccacataactcacacgggaaatggaaaggaccagtaggagaaatatttgacacatgttagtcagaaagaccaccgagtaactgctccagagttgcaggcttttcactctttggaatgaaaatctttttaacggccaggagaaaatacatgcctctcccagatgcatctttgctcaggtcttggggtggagggacttggaagtactgggtacagaggtgatagcgaaagataatctcataggccatggaggatgggctccgctcccaaggctgaccttccaaggctgactcaggaccttcccctcccatttccttggtaacactacaaagagaagtccctctctgcagtaaaattgctatatgaaaaggtgggtgttttgggctttgtctcttccctctcagaagtaacccccttgggcttgtcaattactgggccaggagtccctcccaccccagccccccaggaaatccaattgacctgatgataccctgaggagacatggttgcaaattacacccttaatgagagaatttgctcttcttcccagaagccacttcggtggtccagtcccttgcaagagccttcttgaggtgtagctgctgagcctgcctacctttctgagctctaactgaaacagtataactttcccttcccctttatttccattcatttccttctgtcactggcccaaagcttaagcatactttcccaggcttgcattttcacacactctctctttctgaagtcctgaccatacagttgctcattggcttctgtgtccagatgcctgtcttctgtcttctttgtctccatgtcccttctttggacagctgccaagatttgcagcttttttgctttgttgtttttctctcaaaagtctaataaaattttctttggggttccttctgagtcttttttaaagttatttcattaatgagactcagaaccacaaaagggaacctcagtttccctggtaacagatttttgggatggattatggtgcctgtccttcctggttttgataaatatggatgcttggaagcactgtcccagctctgggtctcatcctacaccgtctctaggtggcattttaataaatagctctttttccccaaccttacttgcctgtgttgggtcactccttaaaaactagtttacttacactgtgccccatttcctggggctcccaggagacatttctgggtgcggaataaagttaatggctttctgttattagcttttgaatgcttacatcacttttcatttcctccactgtcatgtgtcaagtagaaaaataaacacagactagtggtctcctctagtgctggaatcgtctcagcagtgacatctctgaggttcagtaggtcaaagctgattgttgattatctgaaccaagtggtgtattggggcggcgttagagggaggctggagtaggttgaaaattcatcctttgtaacatgatttatgggaacagttgtctgtagagatgagaagggagggaaaggaagtcagtctatggcattttaaaaacatgggccaatgttttagttgcttactggagtatgggtgaagggtcatttttaggagcataggtaacttactagtggctataccactgagggaaatacccccaccccattatcaactgtctagatcttcatggaggggtgggctctttccactccttgatggggtgttgatgggtccagtctcatgcaggtagttacagctctgtgagttcaggtgtgcaatggctatgttatatctggacgacagttctgcaacaccccacccttcctctggttcgtccattctttctgtatgcaattccatgagatttggagggatgatatagaaaataaaagatgtcccatgtagtgagatatccaccccacccatacctatgcccaaacagcgtggtcacaggtgaggacatgacagaggaaaagactagatctggagtcccagacccgagagcgctcttgctgcttgctggtcgggtcacaggtaacaacagcctgggaggatccttggagctgaacctgcagcactcacctgcctctcctgtaagtgtgttcttcccaaataaacttcacttaaggtggactgagtccagtgaatcctgattcccatgcaacagtcccacttaggtctgggcagtcacctgctttattctccgcccttagatcagtcacatgtgtctgcaggaactgccactcactgcagaagcagttctctgaccaaagccaacagaagcactattgggattgctggattctgtctgcagtctcttggctttccatctccagtttctagaagcttgcctcatccctgggagttcctctgagatccactgcttaagttgttgtagaacatatgatttatttatagtaacagttatgttcatgtgtgtaggacatttcttttccatgcatctcacaaatagtttcagagcaggaataattggaggcctgaagctctccattattatgcaagaaaagaataaatttcagagcaattaattatgtgaccctttgctgtgttagaagtgagattctaagcaaccaacagcttggcattccatcaaactggcattcttccagtcagcatgaatcacagtcagagcttcctgggcaagaaccaataacacaacatagaccaagggaattacctgcctcaacccaattccctcattttaaaatgaagcaacaccacccgcaggactgtagaaacagccagcccttaggataatatatgtttgaatgtaaagtgtcccacacaggctcaggtactgaaggtgggcctggtttgggggacactagacacctacagagagggagcatacctagaggaagcaagtcactgggggcaggtgctttgtggctatcttgttcctggccacttcctgtttgtgtttgtcatttctttctactatgagatgaacaaccttcaccacatgctgtcattgtcatggttgttgaagcctgtgaggccaggtgaccatggaccaaacccttcgaaattgtgaaccttcatgtcaccataaggggtgtggtcacaggtttgcaaagtaaagaataaagatgaccagggtaaatggtgtggctgaaatatgtgacaaattcaaattcactattactgagggttatttcattatcaaataaggacagtattgctcctcttgaaaagtcacagaactaaccaaagatacttgctatatttttggaagacttctgaatatctgtatagctttctgccttacgactctggctttcatcgtcagtgtggcacaatctagaattacctcggaagggagtctcagagtgggactctctagatcaggttggcctctgggcatgtctacaggggattgtcttgattttgacggttaaggcaggaaggcatgtccgtagtggatggcaccattccctaggaagaggattatgaactgtctaagagtgaaaaaagtgagctaaggacaagcttgcatgcattcattcattgctctgtcttcctgattatggatgtgatgtcaacagtttcctgaagttcctgctgctacgagttccctgcagtgatgggaatataatcttgaactacgaactgaaatagaccctttgtcccttgtcctgtcagggcatttcatcacagcaacaggaaaagaaactatgtcatcttgtatccactgtttgctaatgaagactcacacacacctctgatgtgtctggaagggtgtttctagagagatgtaactgaggagagaagattaactctgtgggaagcactctgtggggagggaatgagatgagcctgtatgtggatctctctctttccggttcctgcctgtgctgcagtgtgcaggccgcctcacactctttctgccatgcctccttgcttccatggactgtcctcacaaagtgtgagccatctttagttgctcttcatcggatgttttatctcagcaatgggaaaaataatagcacaaacaaattaagagtttttcccctccgttctatgggattgagtgcaagtgtttgcgacagtctagcatggttagtctgtagttttgtggcaaagtgtgccataatccagacaaccatgaattctccagaaggggagctccggacagatttatggctaaatgttatagaaaagtattcctggtggatatacttggagaatgtgacagtcactgaaataatgagtgattcaccagccagaggcttagattataagcaaaggaagccaaataattttcaccttgtcttaatctccctgtaacccccaaggctcaaaccaccgtctcccacaagtgtgcatgttttaattggtctactggagagagacagaaaacttatttctgttctaagcacaggggtttgaggctagaagaactttgtaggggaagtagtataaatacattagaatggattatccttccacatagcccgaagcttttctttttgatgccttataggagagagggaatgacaaaactcatattcattagggattgcattatgtctcaatttgaaggcgggttaccagtctcagggtttaaggttcttttgtgaatctgagaaatagcttggctcttcactgtgttatggctgtgaatatttgttgacatgctaaagactgcctaccggttattattaccctaagtaaacacacattattactatgatgagggttttgtgatttctcaaagctgaggtttttagaaattgtctgggttacgctcacatgctccagttggactctccccacgttaatttgatgagatcgaatgagatggactgttctcttattatcttttccttttgtccacgccggccccccccccccccccgccatgtgtgcatgttgttcatgtatgtgagtgtgtggtcacattcatgtcattgtgtacatgtggcagtcagaagacacaagccagatgaagacaagcacatatacaatctctgttttctggatcacaaagccctgaatatttctctggaaattattatgttatctcctgaaactcttgactgagaatgagagagaatgagaaagcaaatgttctctctctaccaggaaatgtcataatgtcttgaaatagatttaatacaggccttgatgaccacgtgaaaagtaattcccttttgctgttcaggttttgcctggctagagctcatcaggtaactgtattattaacctgtctgaatccacacgggcacacgcatgttattctggcttaattattgacattgtctggtgattaagaactttttgtttgtttgcttgttttgtttttgtttttcgagacagggtttctctgtgtagctttgggagcctgtcctggcacttgctttgtagaccaggcagtgactgagaacttaaaattaagcatatacctgtgccttgggtctgaacgaaggagacaatgatcctgtgaacaaacagggtatgaaccaatacacatcaacgtgcatttttttctccagctaacctgtgttcagactagtgctggacttggctctcaaatgctctgaaggccagtgtgttaaagtgatggtccccaggctactgggtacatgcatccaaagtgactgtgggactccaggcccctctgttttcttgctgatttgtgatgtcaatggttgtcttctactgtagttggtctttcttcaccctttattctttgaggggcctgccacccagatcccaaataaatcacagggagtattattcttttttaaaaaaatttaaattagaaacaagcttgttttacatgtcaatcccagttccctctccctcctcctgggccccccaccaaccccctatcccattccttttttgctccccagggagggcgaggccttgcatgggggatcttcaaagtctgtcatagtatttggagcagggcctaggccctccccaatgtgtctgggctgagagagtatccctctctgtagaatgggctcccaaagtccattcgtatactggggataaatactgatccactaccagaagccccgttgattgcccgggtctcctaactgacactaaagttcagggggcctgggtcagtcctatgctggtttcccagctatcagcctggggcccatgagctcctccttgttcaggtcagctgtttctgtgggtttcaccagcttggtcttgactcctttgctcatcactcctctgatggggaatgtactgtgtatgtttatcttattgattattgaataaaatactgttcagccaatgagacagcaagttagatgggactagaagtcaaagaggattctgggaaagtagtagagaagtgtgatccagacaggaagtgacatagcaaggagattcatatttaaagaaggagaaacaggaagcgtctctcttttcccctcagctcctgctccagcagcacaatgtgatccactggcaaggagggacaccaataaggcgtccgataaggtaagtcctataaaatatataggtttatgatagttaagactgagctaacagatgagaatcctagtcattggccaagcagcattgtacctaatacaaggttctgtgtattcatttgggcctaactcaggcgcgctgctggcgtaaagtgcacatgtagcggtggggctctgcggcttttggcggaaagatttattgtaacactcctccctctctgcagctggattccagaggtcagctcagtgtttagctgtgtgtgtctgcttctgcttccatcagctactggatgaaggttctaggatggcatataaggtaggcatcaatctcattatcagggaaggacatttaaggtagcctctccattattggggagtattattctttcttatgaatgcccagctttagcttggcttgttattagcaagcttttcttaaattaccctatcttttgcctctgggcttttatctttctgtatacctttccttcctttttactctgtggcttgctgtgtggctgtgtggctggctcctagtcttcttcccctcctttcactcctcctccatctactctttccagatttctcctcctatgtattctctctgcccgccagtcctacctatcctttctcctcccaagctattggccatccagctctttattagaacaatcaggtgttttaggcaggcaaagtaacacagtttcacagaattaaacaaatgcaacataaaagaatggaacacatcttcgaatccttaaacaaatgttccccagcataaacaaatgtaacacatctcaaactaatattctgtaacacatacccaataaaaagataatgaaatataaaaacaaaatttgaggatgaaggtgataaacaaatggaatgagaaagaaaaagttgaaatggcaaatcctgtgaggattaagaaaagcttcacacattcttaagccaggaacataacaagtcattgtttagctgtttttctatttatttatttatttaatttactgagacaaggccttgctatatttcaggggctggcttagagctcactattctcctaggctggatttgaactctttgagagctacagtggtatcttgtttatgatctaacaaataaagcttacttgaagatcagagtgcagaggtagctacactagttagtcagagaggtcaggcagtggtggcacacacctttaatcccagaacttgggagaaagaggcagacagatttctgctagttcaaggccaccctgggctatacaaaattgatccagtctaaaagagaaaacagtgccaatcagtggtgactcacacctttaatcccagtacttgggagtcacacacttttaatcccagcactaaggaggtgaagacaggaagggatatgactgggcagagagaggagcataaaacaggaggagacaggggctcactgcagtctgagcagtcagtctgaggagcagtgcagtctaagcagtctgaggacaggatggcccctttggtctgagcattggtagaggtaagaactccctggcctctctgcttctctgatccttcagttttcaccccctgatagctgagtccaagtttttattatgaagacaaaagagaatttgtactacagaaagccaatgattttgtctacaattttaataaaaaagagtggaagtgaattaaaatatttctttcactcagatcattatccttaaatattattagatattttagacatttattttttatttttattttatatgtatgaccctttgcttgcatgtatgtatatacatcgtgtgtgtgcaagtgcctgcagaggccagaagagagcatcaggtcccctggaatctggagttatagatggctgtgagctgccatgtgggtgctaggaaccaaaactaggtcctctgcaagagcagcaaagtgtgcttaactcctgagccatctttgaagtcccatattttgaacttttgaaacagtctcattgtgtattccaaaaaagccttaaactcataacccctctgccgggattacaggcatgcaagcatgcttggctcaaagtatatcttaagaactgagagaaggcctctgtttatcttgactttccttgtgggaattgcatcctctacagcttctgctacagacagcaggctagatagatatttctggccaggcagcaaagccctgctctgacaaatactctctggtctgaggacaaggaggtgtccatgaagctggggtcaaagtgttcctctgagcccacaaagtggacagtgaataactcagacccttcttggggaacaagatagggcctcgatccaatgtgagagtcttagggtgaatcgtctggtcttggtggtgtggaggtagagctggccatctgctggctccagcatccaccattcaagaccaatgtacacagggctcggggacacccacaaactgaacctgttctcctttggatgaaagaggacatgcactccttggagggactaacgtgaggaaaggatctggcacttaaatttgtgcccatgtggtcaggtgactcctgttcacagcacatattaagggctttgggtgatccgattttctttaatcagtaatacacggtgacatttttctgtactaagaactgtttgttctgtgttgtgctccttcactgccggacacttaggctgtttctattttttttttaaacaacattgtaaacaatttgtggtttttattttctcagggatggatctgatctctttccagactgctttttcttaaaagaaaattttaaacatagcctagttggctgggtcagtgacgtggaatttccccctcatttctttgaaacatgcctttaggcttgaggctttacatttctattctactgggatattgcagcaatgtttccaccagagcccaaagggcagtgaagtactgcgtcccccatagtgctgcgtccccctcagcacccagcgggaactgccaagggcctgtcggctgttctgagacacggatgaggcacagctttctgacacattgtcagagttaggccaggtagcagcagcttgatagaatgggcattttctgtatatttactacaaagctatttctttccatgtggtgccgtgtgtgtgtgtgtgtgtgtgtgtgtgtgtgtgtgtgtgtgtgtggtgtttaatgtgcaatggtatcttaatgctgtgtgtgttgtggaactgtttatgtgtgtagtgccgtgtatatgggagctgggagtatgtgtggagttaggtatatgtttattgtgttgtgtgtaacatgtatgtatggtggtgctgtgtatgtacgtggtgtgtgtgtagttgtatatgtatgtcgagttatgtgtgtgtggtggtattgtggaatatatgtgtgtagtgtgtgtgcatggtatgcatgtgtgtagatctgtgtatgtatggtgtcacatgtgatatgatattagcatgtgtatacttgtttgttgtgtgcatatgtgtgtagaggcccggttgagccaggatttctcactgatcctgaagcatatggatttgactaggtcaactggacaatgaccttcagggagccaactgtctccctctaccccgcaaagctggggctatgggcactcaccatgcctgccttttaacgtggatctgggaatctacgcctgggtcctcatgctggtccagctggtacttggcagatggagccaccttcccagccctcactgtgaattttaagaagcaggggcttggacataatgaagactactgagtcctattgttgatgggagggaaatgtagagaatgtgggagctggtaatgcagctaattaagccaattagtcattaataatgattccaattctacaagcgtcatggaaaaattgaatttatagaaatttaattatttggaacggttacccccttggaaacataatttaagatgcaatcgggccttcttatctaaagaaaatgttgtaatatgacaagtcacaaataagccaaaaaaaatgtaatcagaatcttattacggattccatgaaaacaagtaatcgttctttgtaatgactggttcgtgtctcttctgggaaacacagagtgataaactgcaggcaaaatgtaccagcccaaggtggatgctataaaactcaacaggaaggagattggaatggctcagagcacttgctgccattgagtgggggcagcagagaggtgctccatgttgtgctctatgtagctacagtcctggtgaggtcacagtgaggtccttattgccccaagtgcaatgaggctgtgtttgcttcatggcttccaggctgtgattggtgaatacattacatcggttaggtctccctatgtcaggtgtaagtcaaaaggcctctctcatagcaaacaccttggccacagcaggcacggactgtttcttcatcatccaggatacatagcatctgctacaatagtatcttgaggatacctagcggatgttccaggacccacaaaagacacatcaagactccctatattctaaaacaagaagacagacacatccatgtgcttttaccatgaagagtgtgatgactaaggcaagaagcatgaagtaaaggaaggagaggctcccaggcgctggcactagcaggccattgagtccaaggggctctttactttctcccgaaagcacgtcttccagttcccgtgtgacatcatggtttatttgagaccctctggaccaaaaatagacacagaacttctgcctccactgtctctcaggccagagagcatcagctcactgctggcctcacctaagactgctggtcgtttgatgagtatgtcagagcattgccccaaatcaccacttctattcaaagaaaccctgaatgtgtggtgccatttttctttatgctagatctgggaatatattcatctaggaggaatatccttcacagtggaagccagaagatctacctgtctgactgagagatctgcccttattcccggaggacctcctctcccccaagatctctagcatacacgttcatctccaaggcacctggaggagctttcccttatatcctacccctcaggtcctgctgcgaggagacaatgctatcaaaccagtgaccagcagaatgccccgtgcacattcaactgtgatgtggagcacagaggtgatctacttattaaaccctggggcaggaatgttgaggtgcactgctgtctggccagatgatagaaattaacttcggcatcatttatcctgattcaacagagacagttgtcaaatggagagccaggtgtgttccaggtgccagaatcaaacagctttgattctgtaacacgaacttctgagcaagtgatctcaattatcagcacatggtttagcttctcaagtttgaccctctgcttctaggagctggatatcatttacactggccagtgtgaaagagcctaggggagatggagacagttcccatccctgcttcttttaagtacttgatggggacactaacatataagtcccttcagaaaagtgtcagctttttagtttacacccaccagcccagttttgaatgtattattttgggaaagagagtggggaagacttctaagttttgtctatgtcatttctgtgagcaggtgaaacaagacagtactgaagggttcctgttgaaatggagaagtgtgccagacacactgtggcctatgggctgaagatggatgccccaatgttacagaggaactgtgggtgacagtccaggtggtgagatgtcctgttaattctagagtttatatattatccttttctggtctttgatagagttgaagacagataattaaggttatagttttcttcagttattctaaaagataagttatccttttattttagacagaaaagagcagatgatgggggaagtacttctgtgtatgtttatcttgttgattgtttaataaagttctgcttggccaacgaaacggcaagttaggcaggactaggagtcaaagaggattctgggaaatgtagcagagaagtggtgatccaggcaggaagtgatatagcaaggagactcatatttaaagaaggagaaacaggaagcatctcatttttcttcttactcctgctccagtggcacaatgtgatccaccggcaaggagggacgccaataaggtgtccgataaagataagtcttataaaatatacaggtttatgataattatgtctgagctaatagatgagaatcctagtcattggccaagtagctttgaacctaatacaagtttctgtgtattcatttgggcctaactcaggtgggcggctggtgtaaagctcacacgtagcagtggggctcaggcggcatttggcagaaatatttatcgtaacacaggtgagtcaggggatggggggccttcagttcctgaggaatcatggctttatttctttgtatgagtgagtctgagtgaggatatatgcattttgtgtgtgtgtgtgtgtgtgtgtgtgtgtgtgtgtgtgtgtgtgtgcatgcacacacacaaacaagtgtgcacaagtgcattctctcactcactgcatgcataggagcccatgggccccagaaaagagttggatcctctggaattggagctacaggcagctgtgagccattgtgtaggctctggagacagaacccatgtcctctccaagagcagggagccccctaaccacggaatcatctctccatcccatgatggttagttttaaatgtcaatttgccacaacttagaatttcctgagcagggagcttcggttgaggagttgtagatggcaggttggctatggggagcttcggctgaggagttgtagacggcaggttggctatgggcacatctgtggggcattgccttggttgccttatctggtgagtgaagacctgccacaaacatgaacagtaccttctagttgagacccagctaaaaaggactcagaaggacgattctaatcttttgccccccctcttgccactgagtttatttaccccgaggctgctcattcctttactgacattagaaccagctttttcaggcctccaatgtggactggagaccagtaactctccaggaaccttctaggcctttgttgctacatggctgctggaggccaagccctttgctaggattcttcccactcagctgagatcagaaagcctgtatcaacgacctctctcagagtagaattcctggcttgtgcagatcagtgaataaggaatttttcataggcactggagtcaacctcaaaggatctagtgtggagggccttctcagtcactttggggccagtggtacaggagtaagtgggagtcacaccctcacaggaactgcaccagcatccctgcctcccaaagcctgtgggatcccttcaatacatcatgccttggaatttctgacatctcatttctgcttagtgtgaaccaacattgagctgagatttctgtgaactggttgaatctgctaggaagacctatgccccactgtgtgagaaggacagcaattcagaatgcctgtgaagtatgcctggtatgattagtttggacctaatctaaagttgcttgctccctccctccctccctggctgaacacctcaaaatgcatccttacattttctagttttgccaacacaaggaagcaaagttctgtggaattccccccccccccgcccctttttggtgtataattctttattcttgagtttgattttttgttgcctctttggaggtgtgtgtgtgtgtgtgtgtgtgtgtgtgtgtgtgtgtgtgtgtgtgtgtgaatccaggtctggttttatgactggcggagataactgggacatgtacatacaagcatgaacttggcacatatgttggagatagaacatgaagggttttagtttcatcttttagcatcctctagggcaaggttgataattctaaatgcatcccacacatagctatccaacctaggcctactgatgggaatgggaactgcagagataccaaacaatggccgtttgaaagcattgccaagctgtgtaagactgtcccatggattctgctaaaatattttttccagactaaggaaggtttcccttgtcaaagggattatatttggctggatttattattattgttttgagacaggatctcaagtagctgtgccttgagttgactatgtagctgaggatgactttgaacttctgaaccttctcctcctcctccacttcaggcaaatgacatcagtgttgggggtcaaacacagggcactgtgctcactacacttctttctctattatttatttacttggagacattatataagtcaagctggctatgaactcatggcagttcttttgcctcagcctcatggactgtatatatgcagtgcctggcctacctaactgagatattttgactcggtgttttatgttctaaataaaagtgaagacccaaataatagtactgagatctcgggcttaaagtccattggtagttgctggactcagagattccctttggctttgcatgtctttggttcttccaactctctctctctctccctctgtctcagcttcctccctccttttcaattcccctcccttcccttcccctcccctcccctctcactcctactcagcttcacccctcccacccactcagggcccaggtggatggagctctttctgagatcagcttcacccctcctactcagtttcactaaggcaggaatttgagacaggaactgaagccgagaccaggaaggagtgactactttcttacacggcccaggaccagctgcatagggatggcaacaccgaccatgggctgaccttcctgtatctattaccaaccaagaaaatggtacagaagccaaaatctgatggatgcagttcctcagctgagatctgctcttcccaggtgcaggtctaggtttgtgtcaggttgacaaaaacttggacagttgtcagattctcagataacattcaagtactgaggtaaacatgaagggctcagagggaaaatgcctcaggccatgtgccaatggaagtccctgatgctgactcttaggaggtcagaggtcattaccagggtattcctaagcttatcctgtggttaacataaagcagcctattctcttgatgggtgtttccatacctgccgaccacatggtattgccatgttagcctgacacagtttcagctgtgtgccttggttcaggggtttagtgcagccatctttggttctttaggttggttatagaatggaaacagtcacatgttaaatcttctcttgtttacaacgtatgactgtcagcgtctggagaaggaagctgtttggtctccaacccctgctcagatctatgtccttgtgaggggcaccctgctacatgcaacacgtccttcctccctcagcactaaattatgtatgatgctcagtgtacataaatatttccttctagttggaacctcacttgcaaatggggagtcataaataaaactcaaaagagccagtgaaggtgcgtgaataccacacacacatgaaaaatggatgagcttcttggagagactttgcctcttttattcttcatccatatttaaaatggagaggggtgagcaggttagcagagacggcgaggccatttctcctggctgtgccatccgtgcaaggtcgagtgaaagaaatactccgtgagagccctgtcacttgtttgatgggctgagtttgtttaataaggcaccaagcctgatttaataaacgtccagggctacgtgaggagtgagcctcttactgcgtatccgtgtgctgcctgtgcctttctaaccgttcttccgtgaaactcccgggagtggaaaggctgacctgtaaaatcaattttgtgatctgaagcttctcataagcactgactgtctttgtgaccatagctgtcatggctcagatattcattcaagtgctctgtgtacatcacctcaggtagccctctactttaagatctggaaaatgcatcccagaaatattttattttaaaaccacctcatgagtgaagtggttatctgaactggtctgctgtcttatttctcctagacatcattacagaactttccaatatttttcatacagcaacacaagtaggaagaaaccatatttgtatatagacaggaagactggaagggatttggcatatttactctggagtttgagtactcccatatggtccctagcatcgcacacagccatcatagcacactgggcatgtgggaagaaaccatctttttttttttttttttttcctgggtgataaactcaagctcagggaaccccctctccactacagtggcaataaggcctgagactgatcttggaattcagtcatttttattggcaccaacaggccagagacaggaaaatggataaaggaaaagctcttgatgtgtcttctatttttaaaagaattcttgtatagactcctcactgattggggagggggtgtagtgggtgggagtgacacaagaaatgtcaccagtttcatggattgaccaacaggtggcaccaggtcctaaagcaaaccctttctccttgaagagatggcctaaaccactgatgtcccagattgcttattaaattaggcagattagagaaggatctggaatcctgctcactgagatattcaggccagcttggtttcacacatgaaagaaaaaagacaaagtaaaggcgggcctgaagaaggcatactaaccacagaatcagactgtagaacttctggctaagtcagtggctctcaacctatgggtcccggcccctttaggggttgaattaccctttcacaggggatgcatgtcagttatcctgcaaaacagacatttacattatgattcgtaacagtagcaagagtgtagttataaagcagcaacaaaataatttcatggttggggtcgccataccacgaggagccgtgttacagggttggcagcattaggttgagaaccactaagtgttccaatccttctgagctctagctcccgatgtccagagtaacacagttagcttctgcctttctcagttgtttttgtggaggttgattgtcctgtatacacagttgctgggggtgtgactgttcaacaaagctgtttttatcaccatcctaaaagagagacaaggatgccagggccatgtctttatgaacctctccatctgttttatctgaggatggtatttccaagtgtttactgggggtaggaagttattcttgctattaaatcattccatagcaggttgtctcgaatggtcaccaaggtcaatagaatttcatggttgaagggaaggaagtggcctttgatcaagttaccatgaatctgatcgtccttttcagaaacaccattttgtcataagttcccaaagcagtggaccaaagcatacctagtatgaaaataactatatatagtataaaattctctctccccagactgatagtttagtctttagaaagattgatttattttggttttatgtgtttgggtgttttgcctgtgcaagtatctatgcaccacatgtaggcagtaccagagaaaaccagatgctggatctctaggtgtggagttagagacagttgtgagtgatggaggagctgggactagaacacgggtcctctgcaagagcagctgttgctcttaaccactgagccatctctccagtcctgacatttataatttagaaaaagacaaaggactgacaccatggaaagattgaaagtggttccagaagatggctatgacaatcatgttagttggtgaaggagacctctgattggattaaggaagtttttctttcctctttgctaaatctaatattttctgcacgagtgacatcggtagtgactagttagcagagtggtttccagagaatcataggtgacttctcaataaacaacctatcggacaagaagcagtgaacgccacaggggcccaacctttctcagggcaaaagatactaaacatcttttaattcagcaccgatggccagccaccctcggcagggtgctggggacctgtcagctacttcagctcttcagatataaaagagatgtcatttcaaccagggaaggaaaagcttgctatggggatttaaggaatggggactaagcaatgggaaacttcccagaaggctttgtggagcctagaccttggttcctgctcaacagggtttactctgtcctttgctctcatgtcccctgagcattgggaaagatttatcccgtgtctatatcacagtggtggatgctctgccttcgtggaaaatgctcttatcatgttcatctgcctatgctccccttctttcttcctccctttgaaaatatcagagtttgttgaccgttggtgtcaaacagaggatccggttgctttgtccactgctatagagtctggctcctgggtcacttcctaggtgtttgttaagttgttctggctggatgaagtcaggtctctcccttgtttgctggtgtttatccaagacagtagagcggcgccgtttggtgcatgaagacctacagggaggaaaccttcgggaatgggttctgaccaccatttacaggctttccagaaggaggtggctaatggtgaccatgtttcatggtgtccccagtgagctgcagaggcaactatggaacaaggggaaaagcaatagatgtgttaactgaggtgcctcaggcagaccttgggaaccgtgcccacgtatgtagttttctattctgttataatgtgttagttcaaattcaatgatatgaatttgaactattatcacacggttttgtgggtcagaagtctcacatgggagctagatgccaatagggctatgttctttttaggaggcctgaaggcaattttgtttccatgggaaattcggttctttgcatctttaagacagaagggtcattttcttgatagctgtcattgagtgctattccaaactgcagggttgtcttatattccttggctaatggcatcttcttccatcttcaaagccagtgataacaagttaagtgaatctcatgttccaaagttctcctgacttgtctttccatcttcccaatggactcttctgcctttcaaaaatatttatttttaattatacatgtgtttctacatgtatgtacacatgaacaagtgtgtgctgaggccagaagagggctctggatcccctggaactcaatcacaggtggttatgagctgcctatcatgggtgctggaaatagaacttgggtcctctgaagagcagtgtgagctcctaaccactgagccatctctccagcacccttgttcttgtctttagagattcatgagatcagaattccccttttctcaaacacacccccgaagttgccattgccccaaaggtgacatagtctcatagtctccgaattagattatgcacatctggacggggcaccagtctaccctacccctgttagacttgtgttagtcttgactatgacagatatacttccctcagaatgtctgtgtcttgtctctgttcagccttcctcgtatctactcagtcagtggcctttttttttttttttctgatatgtgtatgacttggtgtttctgttattttctcagcgacgctgtgttttcctgaggaaatccatgcatcttttatgtacagctgaatacatacaagctgttcttgaaatatttaaaatattcaatgagcctctgactctgggggaaggaagcctctcggggctgcagttagatagtagttttccctagattgaaacattccctagtggaggaaggaataagctcctgaaacacaagaaagttacaagactgcaagccacatctccctccagggtaagcagtgaatagcggctgctggtgaggaggaggctctgtgagggtttcagcgagcttgttggtcccctgggtgcagttttcgggagcctatccctcacctgaggtgggcattttgtggtgtagtcccagagtctcccatgctcttgtagaaagccacaaggaacccgtcatccatgttcctgcaggaaatcccaaagaacacactggtacaccgagttagactcgggtgggattgtttctttggtctgtcactgctgtcctctctcgggcaagtagacctttgttcctgtctcctcaggaaaagtcatgcggcagctcttgtcccagggcttatgagcatgtcatcagctggactccctcagcatgaagcctctgaagaattctttctgcacgctgtcttcatttcctctcttgcccctgaagccgtcacagattagtactgaagtcattccagcagtgtatttccgacttagtagttctggaaaggctgaatgccgggaaccttcctaaacaaagatgccatgtcctgtcagagtcatactacacccaaggctcctgtgcagatgggacaatgagactagagacagtgagggtcaggcttgatgcctggattctgtcacccctcttcatgtacaaagtccaaagagtatgtcccagagacaagactggaaactgaaaagtatgcaggttttcaaagggccaccagcagcacacacacgtggttttaacactaatgtgctttgctaaggaccaactgagattgactgttacaaagagcttggaattctcaccattctgactcccctcacctgtggaaaagctgtaggtctctgcttgccactgtggacgagggacctgacttccttagacacccaggccacccagcctccagcctcaatcagcaccaatcgctcattcacgatttgaagtcatgcatttcagatcttctaagagggaggtaataatgaaaatgtggcttagggtcgctgagatggcttcctgactaaaggggcttgtggtcaagcctcatgacatgagttcaagtcctggaacccacagggaagaagagagagtgactcttacaagttgtcctctgacctcctcactcacatgtgatgaaacacacacacacacacacacacacacacacacacacacacacacacacacacaaagagtaaactgttcagaaggctgataccatacatgttcttttcatctttctgcagattatgaagatgataaaaggcacacccacccacccacccctcaaaatgctttcctactttttgtgtttgaacattatccactacccaacatgctttttttcttccagaaggcttataagtaacaaacccagtcacaaacactgagctgccacaagctgattcttcccatgagaagcatgtagataagtcccagggaagggccaaggtcaccccgctgcattgtcagactgcctagcccttcttcagggagctcagaagcaccgtgcagggatatagatgcacagattaagatacgcgggacacagcggtgttgtgaatgagtggacacggggcgccatttgtatttctgtaagttctaaatgagaatcttcttcaggggcgtccgccaactccatcttgtgcctgcgttagctgcttttcttatcagcacaacacaatactcaacgaaagcaacgtaaggtttggctcacagtttaaggagacacggttcatgctggtggagaaagcatggctgaaggagcaggaggtggccagtcacactgtatctgcagtcaggaagcagtcaggaggttcgttctgaactggctttctctttttcacggagtcttagatctcagcccatgaggatggtaccattcaatttagaacagatatccccacctcaataaccccaatctagaaaatccctcatagaggcatgccccgagatttttttccatgttgattctaaccccatcaaatcaacagttatgactgaccctcacagtgccccactgcttagcgaatggcctcacttacatttccaaatgaatggtagatgaatggttcacagcccgagtgactcccgatgcccctctgcacaccatctcagtacagtctgtccttcaagtcctctggcacagtgcttacaagccagacttgctttctcttttccattcatgctctgcatctgacccacagtttcaatgtccctacctacaaaaccatccagagtgtgaccacaaagacgcttgagcagctatggtgcttggaggcaccgtctgtttacctgcttctgtcctgcccttgtcaaactattctcaataactagagactcgactaaagtgtagccagaacttgtcactcacctgcctcaatccttgttccaactctcccagagccttcctccttcctttctgagagtgatggcaggcgtcacactagtccatgagtggctttcccatgacctcttggggctcatccatttccttctgtgtccttccactcaagcaccccagcgtccttgatagacccgaatctgaggctcccaactcagagtcttggcaaagctttttcttatgcctggaaaactttctttaggcagtgttctcctaaaccattgcaccttatttattcctcaatgtaggatatgtgcacacatttgtatacctgagcacaggtgcgcacatttgtgtacatgagcacaggtgcgcacatttgtatacacgagcacaggtgcgcacatttgtgtacatgagtgcaggtgtgcacatgccatgtgtgcacttaggagtcagaagacaactttgggcattggttcttgccttccacctcacgtgaggcagaatccctctgttgtttttctaactttgagctctgggctgactgaccctggagatggcactcctatctctccctcccatctgagccctaaaattagtgattcctatatctatccagattttatgtgggttctgtgcatttgaactcaggtttccatgcttgtataacaagtaatttacccactgagctgtctccacagcccttccttcagtctttgacctgaaggaagtaacccttcagggttacgttatcatggagtatttttctacctaacccatcacagctgccttctccgcccagtgcttcagtctttctccttagcactttccaccgcccataaactgtgttcttttatttcatcaggctgccataaaaatgtgccataaatcgggaagactgaaaacagccctcacagttcaggaagccagaagataaaattctaggtgctcatggggtcagcttcttcttcaggctctgagacagcatccaccctgcctcacccctgccttccagtggctgcagcagcctgaagctctctctcacttgaggctctgtcactccagtctgcctccattgtcacatggtatttttcccttgtttctctgtgtctttctatctagattctttcattctgatgacacttagcagtgctgggttgaaagtgcaccctcacacagcatgatggctggttataattgtctgcaaagatgctctttccaaacagtgtggggttcaagttctagaaggacatggagcttcaaaagttgccaacctgctaagatgtggccttgtttattgatttttccctcactctccatttatgagaacgttgctcaatgtagcctccctcctacacagaacattctgagactcacagcaaaacttagtacagactggagagatgactcagcagttagggattctggactggagagatgactcagcagtcagggattctggactgaagagatgactcagcagtcagggattctggactggagagacgactcagcagttgctgactctgctcttgtagaggatctgagttcagctctcctcaccagcatcaggtagctcataagagctattacttcagttctggggacctcagtgccttcctctggcccccataggcatgatactcacctggatatacccacacacagacacacatacacagataacacacataaaaaattgtgtgttaatttgataatctctctgggtagatgtctggattatatggtagctgataattttgtattattgttcatgaaggtgactagttgggaatcaaaccataacttttcatcctctgattcactttgtatcttctcacagactttggactggcccctcagcccctctgaaactcaaatagaaaatgattcatgttgcaagaggttctgagccctgctatggagtgttactttaactgtgtaaagctgtgttatatttgtttctgctgcatttgtttaattatgaaaagatttgttgctgtttcagcttgcctgcctaagtcacctgattggtctaataaaaatccgaatggccaatagctaggtaggagagggataggtggggctgacaggcagagagaatgcataggagaaatctaggctggaaaagaacaaaagaaaagaaggagaagaaaatgagggagaaagagagggccacacccaggacaagaagccaggcagctgatgactcaccagacatgggaagcagtggagtaagatatacagaaggacagaaaggtaaaaagtcctgaggcgaaaggtgcataattaaagttgaaaaaaaaaaaaaaaaagctagccagaaatgagcctaagctaggccaaagattctaaactattaatacgtctctgtcatgatttgggagctggttggtgggcaaaaagagaaagcctggtacagagctctcaggtctgagatccacacaggtagttagttctccggagtccattctaattatgcttgatgatcctgggcactccagaaatggcctcacgtctatcttctctaacttccctggttgtgagcaaatggaaccagccattccaaggaagacatttccagacagaaagccccagacatgctcttgacatcagagcaaagctctgctcacactgaatgcaagtgggaaggctctgtctgccgagaaaacaacagctgagctaacaggtaaacatgcaactctgcatctcaggggcctctttgcctgtttagagactatgacttcaaaacttgcagccttctcaatcagtggaaaatacattatttgattaacaaagagtggttctgctaattaaaatcttttgaaggattaactcactaattagtgaatatacttccagtgttgtatattgaagccaggagctgacacagcctaagtacatactttaccactgaactatactcttgggcaatttggggctttattcttaattaattgcgtattctttgagatggtgggggtgtcttaggttgaccaggctttgccttgaactcctggctcagtgatcctcccatctcagcctcttgatagtcatgggcctctgtgtctagctttaattatcatcatcatcatcatcatcatcatcatcatcatcatcatttcttcagtaaagctgtgtaccttctagggttgtgaaaacatggcttcctgagttgaagcagctagtgtgtggtgctatgtatggcacaagcatgacttggaaggtactggtacagcggccatgcatggcgcagtcatggactctggaagtgcggttctcatgagtctgcccagctgacaggattcccgcctcccacactctctaagctccatctcctcccttcagcccttgtttatggcacacagctgatggaaactgagacttgactcctcttttcggaagttgccatatgcagtcagaaacatggtgtctgcattttctgtctcaatcctccaggttatataggattggttgttggggtcctgcttgcccaggcaggaaatggaaggagacaggaggccctacaggaagaaagaaatgacatagtattatttctttctgtgagttcttgcaaagaccttcctcagtttcttgtgacttacaggttttgaggaatcagaggattcagcctggggtctgagggatagcagatgggagccatgtggcctatcagaaatacttctctcatggctgggacatcatgaaagacacatgaaagggttagcatcccactatccacctgagcacgtacagtgatgaccaaaacctccccagtaccacacaaactaggcatggaggtgcaaatctataatcccataagttcaaggcctgagaccctgtctcaaacaaaacataaaaccctgtgtgtggaaatgtttaaaagcattatatgtaatcccctccaactttcagtagctccatatccagatgagtgcatggaacatagccctgctctagaaggaaaaagaataaaccatctacacgtgtgaacaccagcatagacctcaaatgccacctacacatgtgaacaccagcatagacctcaaatgtcacctacacgtgtgaacaccaacatagacctcaaatgtcacctacacgtgtgaacaccagcatagacctcaaatgtcacctacgagtgtgaacaccagcatagacctcaaatgtcacctacgagtgtgaacaccaacatagacctcaaatgtcacttatgcgtgtgaacaccagcatagatgtcaaatgtcacctacacgtatgaacaccatcatagacctcaaatgtcacacatgtgagcaccagcatagacctcaaatgtcacctacacgtgtgaacaccagcatagacctcaaatgtcacctacacgtgtgaacaccagcatagactcaaatgtcacacatgtgagcaccagcataggcctcaaatgtcacctatgcgtgtgaacaccagcatagacctcaaatgccacctacgcatgtgaacaccagcataggcctcaaatgtcacctacacgtgtgaacaccagcatagacctcaaatgtcacctatgcgtgtgaacaccaacatagacctcaaatgtcacctacacgtgtgaacaccagcatagacctcaaatgtcacacatgtgagcaccagcataggcctcaaatgtcacctatgcatgtgaacaccagcatagacctcaaatgccacctacgcgtgtgaacaccagcatagacctcaaatgtcacctacacgtgtgagcaccagcatagacatcaaatgtgatttgataagttaggaaccctataaactgggttcaaaaggccatttagtgtatgtcttcatttgtgcaatattctggaaatgttaaatccacagggctttgatgggggaaatacttctgtgtatgtttataaataaagtacttgcttggccaatgagacaacaggttaggctggactaggagtcaaagaggattctgggaaatgtagtagagaagtggtgttccagagaggaagtgacatagcaaggagactcatatttaagaagaggaaaaaggaagtgtcgctctctttttccctcggctcctgctccagcggcacgatgtgattcaccagcaaggagggacgccaataaggcgtccgataagtcccataaaatatatagatgtatgataattgagactgagctaacaaatgagaatcctagtcattggccaagcagctttgtaactaatcaagtctctctgtgtattcatttgggcctaacttgggcgggcggctggcgtaaagctcgcacgtggtggtggggctcaggcggcttttggcaaaaagatttatagtaacagggcttggggcatggtgaggccagagtgactgagggagagctgattccaaacaggcatgggagaggccagatggaggatctgtaagacacaaactgtgccatggttgtggtggataaactgtacctttgttaaaacccacaggactgacccttctcaggaataaaatgaaatgtaaaacattaagaaaaagttggtaaaacagttcttataagtctgtctccaagtggaaaagggagcaaaaaaaacccaccgaagtttctgagcttggtgctgtggttcaggtaatggtgagaaaaggctctacagtcattacctctcttagcaagttcagcagctgttacagtactgtgaacagcaggcaccgtagcccacagaagatctccacaatgtatccacatgatcacagcattaaggtaaagttggtaaaacttcccttttccccaccagctacacttcctcacctcgcctacctcagcttctggcacccggcactctgcctccttcctctcatacagtgggtgctaccagtgtctgtcatgttgctcttttcacaaagtatgtcctttggtcttaccagtgttatcacaagtgacgaaatcctgctcttctaaatggctgaaaatattccattgtatatccatagaatattttctttattcattctcatgataagggacacaggttgcttccatgtcttggccactgaacccaagcctcgaaggccattgaacagtgctatagagagcatgtggatgtgtacagtttccagacccattgctctccttccctttgggcttaaggagtgacatcatcggaacaatggtagtctgtgagtccaaggcacttcaatgtgttttccacagtggcttcactcactgaccacctgtggtgacatcctgcctatacaaaggaagcctgtctgaaggtcagagaatggagctcaccactagctaaccatagggaactggaggtctgtgctataagtgggcagaaccagggactgcctctcttttccgctgagacgcttaggaggtgaggtgtggctgtggtttgctcctccttctctctgatctctcagcattttcctctatatctgaatccgggtttttaattagttagaccaattagaactccatttacatccaccttcccaccgacggtgtccagagtgacctttcccccacctctttgcagcagctgttttggtttttgatcatcgccaccctggtagatactgtagcttacaaggactcggatcaaagagctattgtctgctgtccacttctccaaacacccagctcctaagagtcccatcagttcttatcgttacattttcatttgtgtgcattgaaatgcttcatgtaaggtcccttaggatggctaatgtcatacaaccagtgctgaccagtgccgggcagggtgtgaaggtggaagatgctgacatcattggggttgtaggttggcggccgttatggaaaatagcacgatggttcataaaagagctcgcaactacaacactgtccatccagcacccctactgcagggtccagctcagaactgaaatggtttgcccacctggtcacggccttccaggcaatgctgctcaacacacagaggctttggtcacatctcactgctgcctctgcctggagtctctctgtccatctcttcctgtagcagattccatccagcagggggcccactcctctattctaaggtctgctctcctccctcccccctgcagcactctccagagctgctctcctccctcccccctgcagcactccccagagctgctctccttcctcccccctgcagaactccccagagctgctctcctccttccccctgcagaactccccagagctgctctcctccctcccccctgcagcactccccagagccagtgtttatttattgttttcccttcaagaatgcacacactatgagggcagataatttcttgtccacagctggatctgacacagcccagagcattccaaggagtttgcacaatatttgtcaagtgagtcagtgctttatagtagagtcagccaatgaaggaacaaatgaccagggaaagcttaccattcctgaagcttttgtttgtcatctcacaaagctggctgatgccttagctgcggttttttgctggctttttttggttaatactgtgaaaattggacattttccaggtttggacataaaattggaaaagatggagttctcagaccccatgttggtaacagttttaaaaaggagggggcaggaatgactccccagggaggcagggaattgcacgttctctatgggccttaactgacatgctctccccagctttacagagctgtaactggactatgaaatcatgtccatttaaggcacgcatcattgtgtttggttgttaatatacattgtcacaacattgctgtgaccaagttactagtatattcatcacctcatctcatagttatctcttttattttaaaaaatttagagactagtttttattttaaattgtgtgtgtgtgtggggggcgggtatgtatgtgcacttgaatccaagtgcttgcagagtacagaaatgtcacatctgtaccacctagagttccagacaattgtgggctgtcatgtgggtgctgggaactgaacttgggtcctctagaagggcagccagtgctcttaagtgcagagtcagctctctagcaccccttattatctttttgtggtaaggacttttaagtaatgccatcaaccttttaaagctaacattttaaattctgcaatcacgatggttgggcagagactgaagaaaatctctgcacatgtttgattgtggagttgtaaattggtaagttatggaaaaagtagagaggatcataagaaattaaagctatgactgtcatgagatctttttgctgagtatacattaacactgaatcagtgtcagagagatgtctgcagtccaggttcctttcaggttgaagatacaacagccaagttacagaaacagcaggtcagtagaaaactagagcgatatgtatgggttccacgtaaaaacatcagagggtaactgaggtgggaagacctgtcttgtatgtggatgacgctattccttgagctggagtttctgttcacatccaaagggggaaaaggagaaagtgaggggagttaccaacattcatctctatttctctcctgaccacagatgcaatctggtctaccagtggcaataagttccccgccatgatggactgtctccccttgaactgtaagctgagagaaccccatcatcccttcatttgattcttgttagttattttaccctagcaaccaatacaaccattttcctcctctgcctgcattcctaaataatagtcatttgtactcagataaatgttcacctgccttataaaacatgaaggatcttgtctttagctcacagtgggcttctcttgcttcgttgactaccagggaataacacctagcctccgctcctcttacactctttacccaagtcacccatcaagttcatggccttgtttccaggaagtcgtctctcctcctggcctagggaagatgctcttgtcagttctttatgaggcaaattgggcttaatcacagctctcctccctattgaatgcaagatcttttggtgatgcatgcattacaggtagttccccattcaaatatagtgccaggcacactctgggtgccttttagttgaagtactgatgattgaccctagggccttggtgtactacacaaatatgccaccgttgagctctctccttatcctgtaatagatgcttaccacaaatatgctgatagatgaatattcctgaatattacctctagtattctcagtggtgaatgttgagagaccctaccccctccctgcttaaactttgcttttgctctgtttgaatggatcctgcttgtgattggcacttgggtagctcctcccatgacacactcagattctggttcctcaggtgtctgccctatattaaccagactctgttgtagacaggattgtcttagtagccttgtccctcattcccaccccatccattcattagaaatggtaacacacacacacacatacacacacacacacacacacacacacacacacacacacacacacagaaggaggagcatctttaatctgtgctgaatccaacagaaatgaacaaagatggaggctgttgtctccagtaccacttggtgcctgaagaggccctgagcactgagtagcccacagatgaggaacttttttttttttaatgcaaactgcacgaggctttattgttgtttaacgagctaaccccatgttagcttgggtctttcatccacccaccatggtggatggctagaaaagactgctcgaagtgtctgcatagagatcttatagggcagcgtaaggggagtgtctaggggtacaaacaggctcaggattggtgtggctccaggcttggagggcttgccctgtgttgattggtcaactggttgttttggcccataggccctcccagggtggttgctatgctctgcgcgtcattgccatgcgcgtgtccgtaaagcacacccagagccgtaaagcagctaacttctgattggttcagatgaggaactttttgaagttcataatttctaaacactttaactctaatacaaacgaaatggcagataactgaaatatctgggaaaatgcgtgatgttcagagtcttggcagattgcctgtctgtctcgcccacgcttgaaaactgtctcaaagggagagtcaatcaaggtgctcctccatcccctcctgctcatttctcccagggtcttgattttcagtacaagatttgggaggtcctaaaacccacctgtccactttgaacttgcagtgggccctgttctgagccctttccctccgttctcttccacaagctacagtttgccactcatccgcagacatcaagagaagtcatggcgttggtttgcttctgcccagccattgcccacaacaagctccgttgcaggaacagccttggcctcttgtggcccatctttgccaattgccttcttgacatcgccatagaaacgccgaggctttcatgacagggtgattacatctttccaggttttgacaactagaagaaacaaacagcaaacccagatactgaaattccagcttctccacggcataggtgacacacatgcacactagagaagatgagctctgttgtgtttggttctgttttccactgacagggacgatgcttctgtctagtatgagagagtgcatgctgagtacccaagcatccaatttgctagactttgctatgtggctctgacagcctgcttgacagatgcaatcatcatttacagacaggagcggccctgtcaggtaacagcttcctgagaggggccattgccccaccctacaccatctattgggtttgacagtttgcaaggaagtctagaaaaaaagtttaaaaaaaatctgtgaaagggaaggcttattttatccaaccatcttggaaataccacagacattagagcattcttcttaagctacgcacaactttgcctcatcagctgctaattaaggacattaatttatctgtttctttggtactggaaacacgaggcttagttcagcaggagctgtaatttatcatggctttcgatttcttttttgagcaattcaaaattatgctttgccataaatgatttatgaggcgtttattcttatttaatcagcatttttaacatagtattctttggcatgacgtacctctggagactgttaagtttatcacttggtgttcattttaataagaaccttctgacattcccaagagcccaagaaaaactacccagaagttcctgcccaatattgagtgtggttctggctggaagaaccctattcatcaaattcattaataccttggaggaggtttaagtaagaaacgactccctcggtccccagttggccgggaaagttgtggtacctgtggatgcagaaccttgctggaagaaggacgtcactgaacatgggccttggaagtctatagcctttccccgtttccagtttgttccttttgcttcgtgttttccacggaagatgtgatctatcaactccctgttccagccacccagctacctttcctctggcacaattatggactctccttctggagccatgcaccaagataaactggcctttctaggagctgctctctgccatgatgttttatcacagcaactactaagtccccacattttcttttcttgtcttgtcttttttgttttcagtgttgggattgaacccaggacttcatgtgtaccacatcagtgctccacctcagagccacagtgttgcccttcaccaacactttaaaagaggagccagagaatggttcacatcttggctttgatgggagggtataaaacccagggcctcttagaaattgttattccagggctgacttccaaatcccagcagccgtgagtgtgtgcacatctggggtagaggagttgacagcggcagagaaggctcacacactacagagatgccacacactcatgcacctgtgtcagctaggttctggggtgcagctgcagggacactgaaggatgtgattgggtggacattaaaaaaggtgctagattgttgagcctgtgttatacaggaagcatttgtgcaggatgcatgtgtgtgtgtgtgtgtgtgtgtgtgtgtgtgtgcgcgcgcgcgcgcgcacgcgtgcaggtgtgtggtagactgcatacatacttgcccttgcatggacatgtcagggccagaagttgacatcacatatcttcctcaattgctccacctcatgttttggacagatctcacagaatcttgagctcaccaccttggctagatggacctgccagtggctttctagaatctgcctgtctctgttcctttcccccactaccaggctttctgtgaatgctggggtttggaactcaggtcattattcttgtatagtaagtacttagtcctccaagcatttcccggccccaggttacattttaactgaagagttgtctgagcttctgacaatatgttgaacttgcttccttcctttcgacaagtagaccaatacacacacccagctgcttctcacatgcccctcatatcacatgtgcaaggagccatggggtgtaaaggttgcggcattgatgtcttaacatttgcgaacaaggctctaggtgttccttcccttctgtttgctcttctggtactcgatattctaacttacacattgcatagtaactcacccaaatagcctttatttccctgaactgggagtgaggtctaggcattctactggctattgaccctattggtttctgaagtcatttagatgaaacatttcgttgtatttcttaattaatctttaaatatgaatggggaatggaagaacaaaatgtcaatcttagacacagaacttttgaaataaaggtttgagtctcagaaataaagaaatatttcttttattttgtgagataataataatataatcacataatttccccttccctttcctccccccaagcccttccatagacctctccttgttctctcagaaacccatccctggctgtcctgtgccaccataaaggaagagggacaagagaatgaactggagtaaaccatggaaggtagccaaggcagaatgagatgctacactgtgtgtgtagctcttccagaagaaagtgctgcccattgcaacatgccaagctactgctcagcctcttttgttgaatctaacatctcttcagaagtttatttatatgaaaacccaagactgtttctttatcaccttccattttttttgacaaatgggtactgtttgttctagaacatctttgttccctaatatgttcacagagctattcattattatataagttcattacatgtgccaaccttcttatttttataaaaaaaatcacatttaagagtcagttttccccatggtgctggggatgtaactcatcaggtagactacagaaccctttgttgatccacagcaccccataaccaagtgtgctgcctggcatttgactgtaatcccagtccttgggaagtggaagcagaggggtcagaagtttgaggtcatcttggactacatgataccctgcctgaaaaaaatgagagagagagaaaaaaaacagactgagtgtaccacagattttagttttaaagccttttatttcgtatcttggagtcactaggagaattctttctggggagaaaagttacagtgtaattatttaaacatgactacagattaccctggagctttaaaaggaaaaggaatgagacaataagcctgatcattattgccagaaatattttagaaatgttcattatgagatctttgatcacccaaaggcaccggcaggaagcaaaagtgggtagcagtgactgactgattgatccttggacatgcactgaatgaagttaaatgtttcccttcccctgggaaatgcaaaggggaacttagagggtagggtccaggcctgtgtttgccactgacaggtctatatgtgaaggaatgctaacactgggcatctgcatattacacctggtggtttccatgctcttctccagttggaactaagcatggtggtcacagggaaggatgcagttagagctggactcacatggaggctgatgctgtatggagacaccaagcatcctcttgtctgtcaatggggacaatggggatgttgccatcttcaaaatgctggcaccaggacttcactcagtccttttgtgaatctcccagctcaggcttagtgcatatttggttctaactggttgctgctattatcacttggtgagcatgaaccactgaagtcgggctgggtaacagctcctgaaaatatccattttctaatcattggcacctgtattgtattacgtagagaagagggtttgcaggcatcattaaaagtgttaagattgtggattgtatgaacagactcaatgcagccacagaagtctgtaagaaggatccagggaggttagattcagaaaagacatgtcactgaggacaaccagaagtggcgtgttcaccagtacccttcactggaatgatcctaagacaatcatccctagcaagaaacaaggttttcgatggctcagagcttcagagtttctccttctttgcagaaaggatcactgtgttgctgccacagggctccgtgacaatgaggtacaagtggcagaacaaaactgtctcactcaggaccaggaagcaaatgaagaggaagaggaaaggtctggagtctcaataacccattcaagggaacccctgggagtgggctttgagatttcaaaaaacctaagccatgcccagtatctctcccccggccccatgatgataatggaccaaacctctgaaactgtaagcaagctaccaactgaacgctttcctatattaagagtcatggtatatctttacagcaatataacagtgactaagacagttaactttagttgtcaatttgactcagccttagagtcacatgagaagaaagcctcaatgagcgactgtctgcattgggttggcttgtggggaattattttatttaagtttattgatgtgggaatgcccagcccactgtgggcagcacaataccctagacagggtctccagagctgtctaacaggagaaaagtcgaactgaacacaagcaaatatgcctgcatttccctctgctcttggtggtggatgtgctgtgagcagctgttggaagttcctgcctcgacacccccacaatcatgggttgtaacctgaaattttgagctgaagcacaaaccctgtcttccctaagttgctttttgtcaaagtgtcttatcatagcaacaaaaatgaaactagaacattcctttaactgttacttcttgataaaaatccgaggatgacatctactctaactgtaatatgaaatgtttaatgcttatctatattgaacattttattccctgttcagtagagaaaaaagtagactcagtttagagactcgaagctttatcagggtgcagactaaatcggttcatgaatgtcagtccaacgtgttctaggaatggccttccaccaaggctggtatttctgacacacacacagaccacttacttgtgcaattttgtagaatttccctaaaacatcaatgtaggtatttatctgaaaagtctgatttttttttaaataaaagtactttttgaagaaatttctacttgaaaataagggtcttacaccaaaagcattttgctggagagtttgaatattgatttaaaaaacccagcaatttccaacctcctgtcatggagattaaactgccatgagcttcacagtgaaagtatggagtgtttactcacgttgtctaattcaaaacaagtcacttgacttcacagctcaggcttccaactgccacaaaatgagacactgccttcctaatgccttatatttgagttgctatcaatcaaggaatatttccaaagaactgaggagtttcccatacaaccgagacccttatcttaggtaagccacaaacttaagaaaattcctttaagtgtgacttttgcaaagtgacacacttgtatgtctcttccatgattagtgtgaagaggacagactcatcttttctcatctctagagaactgaaacacctcaagggttccttaggaaaagctgtccccataaaatcgccaatgacaggaagtgacaactcatcgtctctgtcagtctggctttccttagtcattgttgcttgtgggggaaatggctcttctcttccactgaatgacagtacactccaaagacccaagttcacttgttgattctcaaccattttatgtctttgccatgacctgaggcagtgcaagcattcggccaccattctttaaatgtctcccaggagcctgctctgggccagaccctgtgaggagcgagccatgtccaagactggtaaagcagcctttgtccttctgatctatctaaaactggtttgagatatctctgaagcaaatgaaaaccatagagcttgagaggaaagaactgtcagactaactttgtgtgggtaacaccatagtactagtgctcttatgtgctagaggtggggtctgccaaacccttgatggccagcaagactgacaatgttcatgtaaatggggttaggatttattgcttcagtatttcttctcttgagttatttcagcattctttctgactatatatgtaatatttagttgtatattatgtatataatatatatcaattaattcaataatgaatctgttcaatttttaagtgtttctataccattggtagtgaactggttgttctgacagggatagcatggcccgggcctcaggaatgtgcaggattccttggaggaccctgctgtggggaagaggaagcggagatgccaggtctctgatacacggatgtggcttagtcattgctccctgttagcacccccagatctctgatttatttttccaggcaggaattttgtcagatccaatagtttatggaggactttgatatctctggaaaaccacacttactaaacagtaatgaaaacggtatttactttctttcagaatctaacttcctcttccgccccctccctcagctactcccttttaaccaaaggttgaatcgctttcctctgtgtatctttttatcaatctgttttaatagattttaaaactatggcaccagcagtcttttttcctacataaacagtataattttctatcatcatttgtaatgcccaaactacctcacatttgggaaaaggattgaaaaaaccagttgaatttggtacttgataaatgtttgttatataaatatttggacaattttagcaataagttatctttgaagtttcccactggggactgctcagaaaagtgaaactagggaaggtataattttagggctttatgtaatttaagcagttcctctaaggatagatgtgacagccaaacattggagagccagtgacagcgagtgtgtaccctgattggctgcttttcactctcttgtaacacaggagatgatgctggccggccataaatctttgaggtgattaaaaagcacaatttagctgttactataccgagatacccacctgggttctgttacttgacagctgaaaggaaatgtcaggagaatgttgttgctgtctagttctggcgggcagcccttctcaatggcgccatcctcagtggaggtggatactcaacaattctttacagatatccaatggtaggaatctcattcactttcggcagctcttattccttctttcctcttccatggggacaaagtggttatcaggcacaaaatctgctcccatacctaactttctttcctgtgaaaggtgctatggtttgagggttacccccaatggttcatgtgttggaaggaaggtaccttgtgtggtagcattgtgaggatagttcaggaggcagggtcttcagtgacgtgaccaagtcatgcaggcacaacccttgcaagctattaacttgaagcatgaaaagtttagttctagattgagttacaaagaaaatctacttgggtccaagttgttagcaagttgctaggttcatcgttcattgggagcagcacaatgtatgcatatgagagagtaagagtctcaagctgccaagggcatcactgggattactgcccaacccaagtggagtcctaggcagctaagctattccctatgcttgcctgcctcattataagggtactctcacctctcactagaggctaaacagagagggcagcccaagatttcattatgaaaagtgtgagctacatgatcatctttcttttacggggtacccagcctcaggcacatccctgaggatagtagccagcctcaggcatacctggaggaagggaaacagagcaggccttacacagatggaagcagaatctctgagttcctccaacagtagctacctataaaatgtcctttgagaacatggccagatcggtgaaaaccagggcagtttcctaacgtggggcagcgagtgcatctttactggttgttttaatcaacagtaaaaattaaatgtagagttacaaggaagcccttcttaaatccttcgcatcaagttaagttagaagagtcatatatcatcctacactgtatttttctttgtatgcaaatgaatacaatttttctttttggtatacacccgtgttcctatggggctcacatgtggaggccatggtttgatagtgagtgtgttacacatgtgttcggatgggggctcacatgtggagggaggccagagtttgatagtgaacatattttcccatttctcacaccttagtttttgagacaggtctctcactaagcctggaactcactactgggctaggttcggctggccgctgagctccagtgcggggttcttctgtcagtggcttgcccctccaagccctggggtcagttttgtcccaccagtgcagctatttaagtgggttctgggatccatatcaggtccccatgcttgagcagtaagcatgctttgactgagctattcactagcccaccaccatttgtttgctgttctgagccagggtctccctctggtaggccaggtgggcttgctggtgagtgctcccactgcatcctcctgagtgctggctgtgagccaccatgcccggttcaccctgcattactggttgagatggagctaagagtagttgagaacacgaagaatgtgctcatcagctccagagcacatctctcctccttggctcagttactcggaaaatgagaaagaatatattcatagagctatgatcaggataaaaaataatgccatgtgaagctagttccgattatgaagttccacacagggactggaagctactgttgcttctggcggcagtgtgcaggtggtggtaatcatttccaacactgcagcgttgctcagggagggcagagtggactggccaaatgcttgaaggcagtgactgtggagaggaatgggaaaaaccaaagaaaacaggaaaagggtgtagggggcagaaaatagcatgtctgaggcagcgagggagaggggcatagaaaggagtcatcctaatttaaccagtggagaagagcccgaggcttcaggacagcttactgtgtgaaagctgtttatacacatatttcactgtctcacaggggtcacacaaagcaagtcttgctggacccatctcttagatgagaaccaagatggccaagagctgatgcaacattaaagaccaacatccagcaagcaaccattagaagcaagatcagaaaacaggagttagaaattcagtgggagaagaaactgaagcagagggaggtaggttgagagaagcaagtgtgggctggagcaactctctgtttcttcttctgaaacctgctctggtccagcagggatgtagttcttagttgtgttggagttctgtgggttttgattgatgtagaatgaagcacaagttcaggtttggtaccggagtccctgcctccatcctggtggatgcattataggcatttcaccttaacattataaacccaaatcaatgtgttagaaattgtctaatgcagaacagaacacacagtatccaaaaaagttacaacacagaaacaacaaaatgaattctcttgctgctttggggattctgggcgttgtggtaagggatttaatgaatgatttcttgtactccttccaacaattttggatgctgctgttgctggtctgaccttatagaagaggaaacagaggcacatggggctaaggagccggcataagaaacacacaaccagtaaatacaggagttgggactggagcccagctgtcctgccccacagaacactcatggagcccagaagtagactacatgagtccatgccatgaagaatacatcatcatctcatttattatattcaaataatatcaattgtctccatccaaaacaataaataattttgagttagttgtatgaaagagctaggaagattacagattttttgttttcatttttaggtttattctgcatgcctgggtgtttttgcttgcacatgtgtctgtgcaacacatgagtgccatgctcagggaggccagaagaggttttggatcccctggaactggagttacagatagctgtgaactgctatgtgggtgctggaaatcaaacccaacctctggcagagcagccaatgcccttaacctctgcgccttctctccagcacctgtatagatattttttgagataatgggtaaaactagaacattgttggaatcagaatgataatatacaaactatagaattgacagagacatcttgctgcctggacagtcacccaaagtaatgttggggcatccatcttctgtctggcagacttctcagtaaatcagcacattttaaactgccccacttgtattgacagttcatcagtcatttttctgtgtcctgcagaacatctggcagactctttcatgaagcaggaaccctgaaggactgtccatcttgttttgcaagttcagcagtcactttcctgtgggtcctgcatgtccagtttatacagcaacagtcaaacagtctaggcaagagcagtttcttgcccaaatggctatttctgctatgtcaaaggcaaaattcataatgaatttcctgaatgcccatcttcctctctgaagtaactggtgtcgccaggagaagttgtgtctcattgtcatgaaaaaccctaaaccttttaaatgccacatattctgtaggtctttgaaaggtttgaagaatatctatccatttcaaatacatctctgtaaatctactaaacctaactaacctaactataatttttgactattataggtgactatataatctgtatttaattatgcattacattttaaaagatctgtataaacacaatacctaaacaagaggagaaatttacatataacaaaattgaccttaaatttgtatcaataaatgaaaatccatacaatgcaaagtattcatttctatatcagataggatgttgaattattgaccctcccacctctgccataatgctcacctgacttaagaagattcccactgtagcattttgcagtgaaatatatgatatcttgaatttgccttaaaatgctatgagaaggagctggagagattgctcggcagttaggaatgggtcagcctattgcagaggacacgaatttggctcccagcacccatgttggggcaggtcatgactgcctgtcactccagatccaggtgcccgcttttgttctacacatgcacctgcacatacatgcacacatacacatacatgtagaagtaaaaaggaagtcttccaacaatgcccaggaatggtgagagtaggggagaggcagggagggaggggaggagaggatgactaaataagtgggagtttattttgctacctttcctgtttttatatttaacattgtcacaatggaacattttaaaaaaagaagcagtttacctaagttcccagaagcccactggtcacacccacactgctgtgtgacacattcgtgtggtgagtgtagggggattggctcaagagcaccaggagccatatctgggagcaccctcaaagccactgttccactcgggccacttttcacattagggcttttttgttaaaacaaacaaagcaaaaaggcactatcccctaagccttttgtttactagaacactgccgtgtaattgttttagcgtgttgtggctcggcatttatttttagcattccctgttttattagctaattcaaaacataaacgcttcctgacatgagcgaaattggcatgtcgcttccaccctagaaaaagctataatcacttgaacttggtggaaagacaaattctcacttccccacagttcacaaagcacaaatgtgtttacaaagatttctccacttaagacagtccggctgacatcgtcttaggcatccacagaaggagtgcatgatgagatagatgaaaagcaagcgtccaggaagttccttcctcacagatgtcactaagagtcattgctcggctctccaggctttcctgaccatgcaccttttcctggcaagatttgatgacattctgcagtgtttttaacaggttaaaatatgtacagatacaggcctgacacccacttctgggcatctgcgtctctcagatttcaggaaaatactcaatttcgtgtggtgagctcagcagcacctacctagggtgcccgtgtaaagtccagtgaattcaaagtcctgtgtgtgtgtgtgtgtgtgtgtgtgtgtgtgtgtgtgtgtgcctgaggagcctcaaggtcaccttgggtgtggttcttcaagaactgtccatcttagttttgctatggctgttttggagacagggtctttttcccggtggtctggagccaatgtgagaaatagattaataggttccattttcagtacaagatcccctagagctcatcagagaatcacaggtaatctgggagcactgggagcctgtctctcttagctggcaggattaaaaaattggaggcagcttgctgagtgacttgggtcccaggcagtactagacacatgcatggatgactgtacttccataaagaattaaggcaacccattataggtttaaagagaaatctggcactagagaaatgtccagagatctacaaggctgacctcaactaacaatctaagcaatagtggagaggctaccttaaatgcccttccctgataatgagattgatgactaccttaaatgccatcctagagccttcatccagtagctgatggaagcagaagcagacacccacagctaagcactgagccaaactcctggaatccagttgcagagagagagagaggaatgatgagcaaaggggtcaagactaggttggtgaaacccacagaagcagctgacctgaacaagggggagctcatggaccccagactaattgctaggaaaccagcatagaactgatctagacccccctaaatgaggatgtcagtttggaggtctggttaatctatggggcctctgatagtgggtcagtgtttacccctaatatatgaatggactttgggagcccattccacatagagagatactctctcagcctggacacactggggaggatctaggccctgctccatatgatatgacagactttgaagattccccatggaaggcctcaccctcctggggttggggtagggagatgggtggggaacaggggaagaggagagggagagggaactgagatttacatgtaaaacaagcttgtttataatttaaataaaaaagaattaagcaatcacaacttaaggggcagagaaatgcagtaagaatataaaaaccactgttttgtgccaaattgatgctctagtcatttttgtcttttgcccaggctgacagacccaaacaagcaaactgtacctctttcactaaggcactcctgtagtcttagtatgaagtcagaatcattgtttctcagatcccactggctaagctggcagtcacaatcccctttgtccacccagtattctgcccagagctgagatcacaggcaccatgcttggctcttatacctgagttctggggttcgaatgcagattttcatgccaggcaggggatttcctgactgactgttcccctatgtgtgtgattcacattctcccacatgagatgggttattgaaggactcacacctgtttaggttagatttggctacaggtgaaaaaaactccagctcctgaagaatgccgagggctctagggccagggtgaaactgtctagctctggtaagatgccggcttgagagtcagaggtattgtaacccgtctctccagtgagtttttgaaatagtgccactctctggccccctttcccccactttgtgataaaccttcccttagcccagaaacttatctgttgttcactgtgatattctccaaaacatgttctcagcactgcacagcagcctttgcaccacggtggctgcctgtgtggaaaaaccatcacacactctcaaatgcagggtacatttctgccctcagaaattgtgtatctgtcttcctgtactcatgtttcagttcaagttagcatcaactcatgcgactagtttaggccagtctccttggctggtgcaagccagtaggaaaggaatctccccgtgtcggatcagtttgcacactgtgaccatgagggacatgtgcacacggatgctaacttttccttccacagggttctgagtggttcccatgacaatgacttcacagtgtcactgtttcaacatcttctccatgagcagccttgtctcagctatcgtagaaaacatttaattggggtttgcttacaggttcattgtcatcatgatgggaagcatggtggcattcaggtagacatgtgctggagaaatagtttgagagttctatatctggatcggcaggtagcaggagcacacacacacacatagacacacacacacacacacacacacacacagagagagagagagagagagagagagagagagagagagagagagagagagagagagagaaagggagggagggagggagagagggagaggcctttgatacctcaaagctctccctccctcaaagctctccctccaacaaggccatgcctactccaacaaggccacagttccaataaaaacactccctaattatcaaggatttaaatatatgagctgatggcggccgttcctatttaaaccaccacattctcctccctggcccccataggcttgtagccatatcatgatgtaaaaatgcatcccttccaacttcaaaagtcctcatagtcactcttctgttgctgtgaagagatgccatgacttatagaagaaagcatttacccggaggtgggggacttggttacaatgttagagagttagtccgttgtcatcatggtggtgaacatggcagcagcaggcaggacaccgttctggagaagtagctgagagttaccctgatccactggcggccagcagagaaagagagagactgggcctggcatgggcttttgagacctcaacaccctcccccagtgacagacttcttccaacaaggccacacctcccaatccttccagtttgtcaactggggattacccatgcaaatatatgagcttatttgggccattctcattcaaaccaccacaccatctgataaaaatattttttcctgggactggagagatggctcagcagttaagagcacttgttgcttagttagaagactcagattcagtttctagcacccacatggtggcccacagccatttgtgactccagttccggggagtacaatgctcacttctgaactctacaggtaccaggcacacacatggtgtgcatacatgcatgcaggcaaaaacatcctactcataagataaagtaaatctaaaaaaaattaaatgaccattttgcctgctctttccgtggagaagtatttagcgattatgaggctatcagataataaagagaaaggtattgatctggggtgggtgcagctgggatccctagagactcaacatgacaagtgacacagaagtggctcatgtggtacgcagactcccaggaaacacgggtaaggggacatggaggagaaataggcaaagaggcaaagagaagacactcactttgaactcggtgagcagttaccactatggacagtggacaccgaactcttcgtaggctgtttgggatgtagtacatacctagaattctccagactcctttcactttggaagcaaggaggcctggttactatgaaccagctttctactgctgtgataaaaatgtcaagagattagacaatttacaagaggaagggtttacttcggctttagtctgtggtcagttgaccatggtttgggggtttgtggtggaggagacaccatgatggacaatgcagtttagaacagttcacatcatgggggaggaagagcgaagctgaggggggttggggagactgtgtaagtgtccttccaaggacagcaccctagtgacttaacttccttccacgaggtcccaccctctaaagcctctgctgttttccagtgatgccatagactgggggctgagcttatccctgtttgtgggggtcatttacaatcccaaccattagcatgtgttatcccccagccctgactctcattgattgacgactatccctcaaactgttaaaggtctgtggctctgggccaccccaacccatgggaggacaccctaagatgaacagtcacagaaacagcgggacattgaggcagagtgaaaataatgccttacaagagacatggatgttgagtggttctttgtatgtcccaactgagcagataaccgggttctgtgtcatctggccctcgggctcttaagttcatagatttactgacagttctcaaatcagtgcagagaatcaacacttgacactgaacacagtctgcaattatttgcatctaacatccccccaaagctgtgtgttaagagtttggtccacagtggagggcactgctgggagctgttggaaatgctgactttagaaagagggactgtattagaaataggtcactgggagcaagcctttgaagaacatgttttgtctcttgtccttagctgtcattctctcttgcagttgccttgggatgagcagaactctcctgccacagaatcatgtcactatgtttttctgatttaccaccacaggccacaagcaaaggagacctaccttccttccactaggccctgccctctaacagtggaatgaaatccctgtaagcctgatccaaaagtctcaagtattttgtcacggcaatgataaaagataatatagacccctgttctgctcaccctcaagcaataagactgtaaggaaattcttttgttcactgtggcatctaagtagaatacccaattaccttgcagaagacccaattaaaatttaattgatcaaattatcatgtctgctttctaacattattaaaatggaagtattctctttctgttttaattttttaagttatggctcacagagctttacaaggtattaatcagttaacttagagcctagttaaaatagttctcttagtaaatgttaggaaaatgaataaatgaaacagagacagccattattagacaatgttacatttcaagctatgctaaagtcatttcaattaattctgttattataacccttaacatgcttaacacactatgctccaataggaaccagtccttgatgtgctggcaattgctagaagatagaattccattagcagcaatacaggagtctacttaacctacatagactttctgtttgttttatctgatggacgacgtcaggttaaccagtttgtatctgcgttaaagaatatcttgacttttgaaatacaaacatatgctatccattatctgtgaataaatctgctgagttcagagtagttttctttggactgtacttagtgtcaaattagttggctctatacatttattgatattaaataatctatttatcattttattttgtgtgtatgggtgctttgctcacatatatgtctatgtattatgtgtttgcctagtgcctgttgaggccagaagagggcattggatctcttggaactagaattacacatggttgcaaggtgagtgctggaaattgaaccctggtcctctacaagagccacacgtgcttttaaccactgagccatctctccatccccttaagatacttttgacacagtaccttgctttatccttatatccccgagaaagagaataactgaagaaccaattactagtgaacatactgactagataaagaaagtcagtctcaactctggaactctcttctcaggaattaaaatccaattaattaattatgcatgcaggactatgaggcagcatccaccctgttggctctgttttcttcttttagcatttcttcttttagcattagcagcagctggaggcaggtggacattctcagggaatacactgtggtaagcacagtgcacagggaggctgcccagaggaccttgagtggattcctagtctacatccccacttagatggcaagattggccaactgattgaccatgacatctgcagttcagcaggggaaggccacggattcctgtgatggaagagagtaatcatgtgttcaacttactggatactggatttcttgtctgatttttaaagtagtcctttttagtgcctttaaatttgtggcataatttattcaagcctaaagattcattctcgttaccaaattataattttattatatatatatatatatatatatatatatatatatatgttataaaatacattcctcgaaggttcttggctgtcttttttcactgtgcatctccagtgcctgcatatatcatgtgctctttcagtattcactgaatgtatagcttaaagtctaagtgatttttcttatttctttgaaaccataatgactgtgttgtttctcattgaccagaagtatactcttctctttcctggggttgggatggaccttgaaaatatgagaaccaagcaagtcaaaacatttaatttcaacaaatctctagtattacgttgacccaggattgcatgtatccaaattgaaaagctattttcacagctatttaggtttgggtatattcactaagatcctggggtccagagcctggtatgtgattcattttccattctctgcttcagtgggagctttttgaagaatgcaatgctggtctttgtgttatcaacactaatacggtgtttggttccttttagggaggtctagtctcactttacctaagaaatgcaggaaaaatcagaaatcatataattttactgcatgcttgtgtaatacttggcacccacggatcacctctgctgtttgaatctgtctttctctctcttttctagagaggttgggctctgagtaaaaactcccattcctcttcttctaatcatcttcactacatacttgattggatccaaggctccttttatgccttgaccacctctctggaaggtagacaagtgctcagctaaatgtagattctaaacaggcttcgaaagaaaatctcctactctgcactaagcctgagagccaattgatgttgactgatggcattgggttagcagtatgttgttactttggctagtccataggcatatggctttggtctgagcatctctgaagtgagtagccatggattacggggttatcctggggtcactggttttgcttcctatacacagtagtaaatccaggctccccttgttcccggttgtctgtattctctccatgtccatgtggaacctgtctgtagtgttcagcttgcaatcttgtgctccctccccaccccaggcacttctcccagcataaaataaaatgtcatgtatctgaataagacagaaattttgaactaaagaatttgagttctgcactatatttgtttcaggggaaaattggatcactgtagagacagatggagctgccacctatttttttttttatagacacaaacaggagcttttagaagactagtgctaaaattacataagaataaaatctaaggcaggcaagatgggacctaggaggttatttttatgtattttagttatcttacaatttctgtataataccttgtcagtcatcttagtaagaaacaaattgtgaattttgtaaatggaccagatgatgtctaaattgggacagagacataaaacatttgggcctagtgcacacaagaaacaaaagtaaggatgaactggaagtccccaattgaagatagggtatgatagacactctgaggagagaggccaccatcatcactgaaaatgacatctactgaaacaggagcaggtgccatgcaacaaaagaaaggacggaggactgaaacaaatgccaagacatgttcagaatagtaacttttaaatttgatcttatctgccatctttaatcctttcatttggggattcccacgtttttatttttaaactactgtgacaactcactgcattattctaccaaatatttagagattcccattcattttaagcaaaggaagcaatagtatgatttccttgttagagaaacaggaaggaaggaaggactgtggaagtctgtgcaggagccaggaagtgggtgttggactctgaaaggaaggcaatcctcagcagtagatgcaagcaacagaaaatcaaccagcaggaacatgttttctgtttgaagacctccccgattgtttgttactgtgaccagatacctgacaaggggcagcttaagcaagaagagcctattttggcaaagtgattttactcagggagacaggaacaaaaattcattcactctaggtagggcaatgatgacagatcaaaaaaaaaaaaaaaaaagaaagaaaaaagaaaaagaaatccccaacaacaacaacaaaaacccaaccaacaccaccatagccacctccaccaaaatgatagacagtagacaatacccaagtctagcttagggaactggtacatttgttggggtttatagtgggaaattaccaatacggagtcaggtagaaatataagggtatttaatagggaaaagccttacttacagagcgacctagccagctggcggtctgtaggcaaggccaaaagagaaaccgaaagcgaaaacgcagtcaccctacgtcccctgaccacgccctcacaagcgtggtcaggtatacctgtagccagcccctaagtaggcgtggctacagcttcccctacaggggttgcctagggagcctggatgattctaacacagttacaaggtctaaaaccctcctggggtgacttccaacacacaaaagctaaatcatggtgccccctgcatacctagctgctgggctgaccagagagagtcctcttctagagaatctactaggtttcaggaacttccctgagacttgggtgttttgtttacttctttacccttaaagggatgtttcagtgggaggaaataggtacacagcgtctagagttcaatgggcacccccatcatgtcggagaaggaatgacagcagatgtgtgaggagggttagtctcattgagtccacagctgggaagtcggaggtggggtggggtgggggcagagagggatagatcttgcctataaaacctcacagcttgttcccagagacccactctctgcagtgaagcaccaccctgtaaagggtgcccactctcccaagtgttcaaaacacataagcctgtgggggaaaagtgggtttatgtgggaattatttatacaggtattttcattagagaaaacccattccatcaccacacacccagggaagtggaggagaaaggaaggataggagggaactaagatttctctctgcttatttcattgttatccacaggcaaagggacttaatgaaaggggaacatgcagcttctgtttcaacagccttaatctccagctggggacaaagcaggggagttatgacagctcttttcttcattttctgtgagtctcgaggaactacatgttgtgaaaaaaacaacaacaaaatcaaaacaaaaccaaaaaactggccagtgaagaaccaagcagcacctagagatgtggagaagtcaggaatcctttactctagtccctgctctaacccagtgctctgcaaagtatggccccaggctgcctctctcaggttttgtgggctggacaactgttgaatccagttcctctgtggccactgcagatggtactcatggcaaaaggggatttcactgaggaaaggcttgtggcataagtggggctggcaaggtcagagcagtttctcttcagtccgtttggagatattcgccttaccaggatagggatgttcctgctagagcacggaagagtacagaagcagaatccagcagtctttttaatgttacaagtgaaactttaatccatattgttttcacatatctttatagctcttaggtaggaattggtatttatgtaggatagtcgattaactatataaggcatatataataagtaataaataaaaaaaacatctgcttcttttctactttaccttaagcacaaatatatctgttatcctatctttatgaaataagaaagccaagtctgacctttgtcaattctgatatggcttcctcacctgtggcttaatgctccattcagggcagagcagacacagagttccaacagctgagtgtcaagggcaggcctgtcctcccctttgagcccccaaatgaagctcatgacttattccatttaggtcaagtccatgtccctcttcctcccccactgcaccatctagaagtcaagaaggaagaagatggtagaatttagacattgactctgaccatggactcttcgtgtgttagacaggaaatactggtgaggaatggaggctggatcatgatccttgtgattggttacaataaatacagtggactgaaaaacatggaaagttctaatggcagaataatcccccactattgtggagatgtgggcgactgagaaagaaaaataacaaaactagaggataattagttaaaattctttgagtgaaatatatttcaatcctttgaaaagttttgctttccttttccttttagctggtctcagtttccggcttactgtaaaagaacattcaattttaatagaaacccttgaattcttgaagttactctaagagttgttgagaaatgaatgtccttagtgtcagagtcagtttctcaaaatattttgtgaagaacactcttaaaacttttatggaagagaagaaactgccaagcccagctggcattcaaagatgagatgacctgcaatgtgctggaaagagtgtaatggccgacagagcattcagatggggaaactcaggtcaatgctgcccagtagacgaagatgaagccatgccacaataacaacgaaacccagtttttcaaacaaactttgaaatagagatcccccagagttctgaattaatccgtctgactggttcacactccaatgtatacaacgtgaggagtgtggcttgcagaatttccagagtttgccagggagaggttcagagtccacccagccatcctcatttttaatcttaagtttccagttggcatatccattcagtagtttatagctgcttcctgttctgaccccttgagacaaggcccaagattctcagcaaatgccacggtctgaatgtatcgcccaagttcacatgctaaacgtagccaccagtgtgatagcactaggagggtccagtgtggaggaggtgactaactcaagcacgggtagcccttctgcactggataatgacttcataaaagagaggttgggttgtaaggagcaattctggccttgcaccctccttccttccattgcagagtgcaagtctctctcagactgagactctgtcagcactgtttctagtcttggtgtttttttatattatcacaaatgacccaaggcattggtggtatttctggaggctattagtatgcctccttctgctgttaataaccacagcaaatagtcaccgtatggagagaaaggcttattctggcttaaagtttagcaaagccaggtcattgtcactgcctttgggcctaagggtgaggtaagacatcatagcaggaacacacacacctcatgacaggaagggaacagagggaggtgaggaaggggtatggtctcactgtcccctccaaggcacacctgtgaccgatgacctgtgattgctatgatggagttactcttgaaggttctaatcggatggggtgggggtaggcgcagactgaagggaggataaaagcccccagccacttgtcagggaaagtttctctcataaccagaagttctgcaatgtagagggacgcacctcagtccggagttcgtccgggtgaatacaggctggatttttgcctggcagataatgacagtgtgtgtcacaaatgattataacaactagcaggtgtttatgtgcagatatgttgatttctaactcagtgcatttccctaattctgtgaatagcatagacgtacaaaaaagtaacttggacccatttcaaagagaggaatgacataaccagtgtcatgggtacatactctctttctgagctcctgtcctgtgcgtggtgaaatttttgagtgctccattctcatgcgagggacaaatgtttgtatttttgccattatgattttacatctactgtatttcagtcttctagatgtcggtctttcataaatggaatttatttttcctaggaacaactaagggacgccttgtggtgggtgggtgagaaagagtaaagcaatattgacttcgaagttctggctttggatgatgcctcatctctgcgctttgtgccctttacttcccgtcagagattgaaatgcacacatagcgtgaggtgaaatttaaataagcattttttcctactataaggtgaaaattgctttgtggttttctgtgaaatacacaagcacacgcaacttagaggcttcttaataaatggacgtcaaagccacctgcaaagtaaaacctgaaactctgtttgcagcagttggtttggcttaccagcttgaacggattaggagctgcctgggaggttagtggctctggggatgtctgtgaggagtttccagagataactggcccctgatggatctgaatctgatctagcaatcagattcattactcagtggattcaaagtatgacaacctgatattgaagttctgggaaggggaccggagccttgctgaaggaggtaggttactggagcatgttcttgggtcatctcttgcctggagcttcttgtttgccttctttttgcttcctggatgcattcaatgtgaacttctcagctccactaccatcatagactgacatttcagaagccatgagccaaagtgactcttctaacacttaagttgtttcgtcaaggtagtctgtcacagagaccctgaataattaataaatgattatgtataattcacaaattcatgtgaatacattttctgcttcttgccccttaaatgatttgagccagtgttcccccaggtgtggacctacaaagcttctatattgtaggacataggccagtgttcctccaggtgtggacacaccaagcttctatattgtaggacataggccagtgttcccccaggtgtggacacaccaagtttctgtcctataaccatctgttttggatttattcagcacagttcctgcaaatttctggagtccatccaaaaattggctgaacaaaacatatgctaaatgcacagggccagtggatgtccataccaggttttctgtgtatgtattatggctcccaatttagtgtttttatgggactcctgaatgtgtgaatgagggggtccctgattcttgtgccttctcttgggctcttttatggtgtgacagcttttgttttatcttattatatattattttgttatgctttattattatatgttagaaacctgtttgctttctaatgagaggcagaaagacagggaatctggatgggaggtgaggtgaggagggactgggggaagtgcagggagggaaaaccataatcaggatacaggaagtgaggggaaatctattttcaataaaaggaaaaaagcgatatatgctcaaaaggcattttcagagattagcatgaactctgtcttcaggtcaactgaataagctgcttttgtaattgctgtgacccagtaacccaccaacagcttggtgaaggaagggttaattggctcacagtttgagagtatagctagctcatcatggttggcttgtgtggtagcagaagtggctctggctgtggcagcaggaacttgaggcagctggtcacagtgtgtctaccgtgaggaggcagagagagatgagtgctgggattcagcttgctttcttcctttacttttactattcagtcattccaagacccttcttcctcaagttagctccttaagcaccctcacagacacgctcagatgtgtgtctctcaggtgattccaagtcaagttgacaatcaagaccaaccggcaaatcaactgattctgggaggggagagttagccagggatggagtggagggtactgcagaggaggggagggttaaccagggatggagtggagggtactgcagaggaggggagggttaaccagggatggagtggagggtactgtagaggagggagaggcaggtcagaggctgaacaagaggacagagtagctggaggaggtgttttcccaggtggcctgagatgagggagaatgggtcccatggtgttagagactgcattgctcctccaaaggcactaagctgagttgtgcaataacgtggctttgatgccagaggaccatcctggtggccaggcaggtggggaaggagtccatggggagcagctctccatcttcctctgagaagcagtgtccagtagatacccccaagtgacattatgtcaagtgtaatggcccatgtgtatattcatatatatgaatataccccatatatatgtatatatatcccacacatattccatgcatgtgctccatatatgtatatatatatatggaaaccacacagaccaaagaccagggtgaacttcaatattatgtaagaattcgtgatttatatgaacatgcaactacatatgcgagaaccaacattttaatgttgagatacagagttaaatgttaacaatggccctgaaaactttaacatttcttatttttcaaagacctggaggcagtgcatgtcatccaaacatggaggatttcaatattgaatattcattgaatattgaaatcatatcccagaaagttcaccgtttatctgtttcttctttcaggaagtgtaaatacgaaacaaagcattcactttttgaaactctctcagagaattcttcggtgggcgtagagagaaggaagtctgtttttatttagtgagcccacaagggaaaccaaactcttaatgtaaattcaagggaaattcttgtttctcagtgtttcatatctttgtgggaagcatcaggttatctgtatggtgttcttcattttctagacatgggacgtggggaataagcaatatcttcagattgaatatttgttcactttttgataattagatggaagctgggttattttgaccatattaataaatccacttaaatactttcccactattatctggtcaatttgaaataattttcaaaggcactgtgtgaaaatctgaatttttttattatgtgcctgagatgtcacatgcatggaaaagcttgagaactttttagaaaaggcaatctgaatcaggaattcggtgcttttgatttttccctattatttttgggtaaaacttgagttgaatcttggatttgaacaaaagctttttgtgtgaagaaaaatggtgtctaactgcttccaggataacaccagaaacgtcagttcattgtgaagatatgatcaggtttcttttcagtctgggcactgaggtcaattgattgatgtgactgtgaactgaatcatttcgtgttgctgcgaattagttttctcacttgtaaattggagataatctttttaatgctcacctggaagtttctatgggtataatttgaacttctctctgggaaataggctatgtggctaccaggattgagaaagatggaaatcaatgaaagattggaggatgctatgtatgtgtgtatgtatgtatgtatgtgtgtatgtgtgtatgtatgtgtgtatgtgtgtatgtatgtgtgtatgtgtgtatgtgtgtatgtgtgtatgtgtgtatgtatgtatgtgtgtatgtatgtgtgtatgtgtgtatgtgtgtatgtgtgtatgtatgtgtgtatgtgtgtatgcgtgtatgtgtgtatgtatgtatgtgtgtatgcgtgtatgtgtgtatgtatgtatgtatgtgtgtatgtgtgtatgtatgtgtgtatgtgtgtatgtatgtgtgtatgtgtgtatgcgtgtatgtgtgtatgtgtgtatgtatgtatgtgtgtatgtgtgtatgtatgtgtgtatgtgtgtatgtgtgtatgcgtgtatgtgtgtatgtatgtatgtgtgtatgtatgtatgtgtgtatgtgtgtatgtgtgtatgtgtgtatgtatgtgtgtatgtgtgtatgcgtgtatgtgtgtatgtatgtatgtgtgtatgcgtgtatgtgtgtatgtatgtatgtatgtgtgtatgtgtgtatgtatgtgtgtatgtgtgtatgtgtgtatgtgtgtatgtgtgtatgtgtgtgtgtatgtatgaatgtatgtacaaatggatggatggatggatggatggatggatggatggatggacaaactgatggatggacaaactgatggatggacaaatggatggatggatgaaaggagaacacacagggtcagggactcactccgaaaccaatagaaggaagagtttttgaagaggatgtgggttccaattattcagagcttgctggagagagagccttgaatgtcattctcagccgggccttagaccttaggcatgtgggtgtttggacatctgaggccacatctattctgtccttggctttgtcatgggcattgtctgtgtctgctgtcagacagatgggagctttcagaggtggaatgacaggaaggagcagggagcctgggggtggatgttcagaagaaaaaagaggaaaggaatgtttgagggaagaaaatagatctctctggtattctcattttcttttctgtaaagtcaagagagagagggggaagtagagtatggagattgaggaaaaggggctaaatggcatccatgagggagaacagtgaggggcctctcagggacaggtctgactcgaggcagggaatgctgtgacaagagagaatgcagtagagagctgataagatgagcacaacctgaagccaggaacagcccatgtcagacagcagggacgctctttctaactcagcatctgctggagagaggcaggactagaattgttaggccctagcgaagcccatatcaatcacttcagatccctgctgttgggtacttgtagtttatgatgggcatggctatgaaagtaacaaatcacacacgtgcacacatacataaccacatgctgcacacatacatacatatacacacacatcataccacacccacctaccctcatgcataccatgtacacacacacatcacactacacaacaccacaatccccaaatgtatatactatacatgtacaccgtatgtgcaaacacagccacacacaaccccctccatgcctacgtgtgtacatttcaatgcagattccacatatgtgagagaaaacacgtgatgttagtctttctggcttatttcacttaacacaatgatctccagtttccactctgtcccgaaaatgtcatgagctcacttttctttacagccacatggattccattctgcagtaagtggtgcattttcttcatgcattcagatgttgggcatctgcgatgctcctgtgtctgagttactgtgacgaagcatcaatcgacagggatgggcgagcgtgtctgtgacatgctgtctgtgtcttgctctgtgtctgtgaacacgggctctcaagatggagagacaaaccttttgctcactgaggcagctgacatccttttctccagctcaggttttgtgtgcctggcgtaggtgtggctgtgtgtgcaggagggtgctccgctgggaaggaaagcagagacacttgcagttgactgagttctctgagtgctctgcagagggcagacggagggaagagcagcagaggatgaagtgcaagccaatcctcacaaggcagagggccgaggctcactgctagctcccctcaggtgtgagtggttctgaggagacactccccagcagtgtccatcctgtgggctgctcctcaattggcctgtaacttgggtgtagaaagccctgcatgtcgatgcatggaaacgctcacacagcctgtctgttgttacactccttcccactgcagactcatacttcctgccgttttcgttggtgagagatgagaccagctataaattaaccgagatcttaatgaacgtttagggataatgcagaccgagtggttcgtagttggttctagcttcggccccattcagactccaccgatgctgaagcagcctttcccttgatgtgatgtagatggtcctgctgccttcatggctggaactcaaggcctctcttaaccccttccataagacggccttggagccggcttggtgtgtgtggagatggtggcctcgatgcagggatgttagctaggagccaggcctcaatcccagatggatgtgcaatggatgagctcaccacacccggtctagtggggaagggagccgagactcaggaagtgagctgggacacagctcagtggtaacacttgtcgggcatgtccaaggttctgggtttcatccatagcacagcaaaggaaaaggttctgggatatgttttcatgttgaagaaaagaaaaataacttactatgcaaaacagtatatactatattaagtatatagatacgtaggacaaaaacgtgttctattttatttgtaattatttactgactagtctacctcaatgtcagaccctatttcctggcataatgtatgggctcattgcatgatgcttaaaaatataatttgagattcagggaacatggctgtctgtgtctaagtctttgtaataaaaatcagtgctgtttagtatttttctattgctttcattttaagctttttaatatttaaaataaaatcccattagaatctaagataaaaaatcagggaaggggataaaaaattcttggagaagaaaacaaacagaaaatgttcaggaagaaagtagaattgtaaagatttatgttttctccaaaacaagaaaggtttggtgaatttcagaatgttaatatatttcaagtaaggcattttctactttgtgtttcagctcttgtcatcttaaattatcactcaatattaataattaagaagagttttacttatggaataaatttataagaattttgagcaccatcacatttaaattcctattcttcaggcaattaccctgttgagtatctcacttccatggtagacactgggcgatgggaacaagctgcattaatacttaattggattattaaaaaaacaaaaaggagacagcaagatgccttggtgagtaaagggctctcttgcaagcctcacaacttgagtttggctcccgaaaaaccgtggcaatctctcacatcacatatccatccatccataggcaatagtaaataaaagttttaggaattagaagatcatatttgggacaagactggaatgtgtagtggggaaggggcatagataaaggcttcctttttccctttttccgaagcagcctgaggtcagaatccactaggtttcccacaccctgtttctcagcagctctcttgtcccacttttgtatgaggaggagcccgggtgacatgtaggggtcagagtgagaaattctgtttttagcaaaggtggtggctccggtgatgttggggtcctgagtacaggagtgtgggaagctgtgggtgtggctgatgtcacatggagtggctgccagtactctgccttctgaggacgtcttcccattaggcacccatgacggtggcggaatgtagctgcacgcaggaggccacggtcccactcaacagaggtaggccttttccagaaaaggtagaagggacacgctgactcagttccccatgtgtcaagagacagaagaacttctgttttgcaacgtcagtttctagctgtcacattcaaagacagtgcaggccaagcgatgctcacagagtgggacacgaagtaggacagggagacaaactgatctggtgtagcagatgcgagcttcacgcttcgagaaggattttctctccttctgcaggctcccctgcagcctgtttccttagggcaccgaagccttttaactccgtgctgcttcatgagttaattcttggtattatttcttgagcgtttatggtcccctaccctgccccaaaagatcttaaccatgcctgtatcttgaagtatttccccaaacagttttaagtcttacgtgagtggctttgattcatttgaagttgatttttgtgcagtgtgagaggcaggcagaaaacgaacaagatcaaacatgggatcggttattgaatggtatatttattaagaagggatactcgcacgagaagcggataaccagatcggcaccctgagaatcccagttccagatgcctccgagtcctggctcttgatcctgcccctctacgtacctgtgaccaccaaagggtcagcggtacaggtacccagggtctctccctacagtaggcatctggtttctttttactgtggttatctcgtttccccagaaccaccgctgagctgttttccctctctccaatgtatattttctctatctttgtcaaaaaccatattgacttgagcacacaggtttatatctgggtctttcctccactgcgttgatctgtgggtctgttctcatgacagcgccacgctgtctttgtcactggctcttgtagtataatttgaagtcaataccttcggcattgttctttttgtgttcaggattgttttgtcttttgggtgtctttcatgtttctctaagaattttggctgggcagtggtggcgcacacctttaatcccagcactcagggggcagaggcagaggcaggcggatctctgtgagtcccaggccagtctggcctacagagcgagttccaggacagccagggctacacagagaaaccacgtgttagtattcaggcatctgcactggcccgtccttggggttctgacaggacacgccctcagctgcagccactgagagcaccacctgtgcacattcactgtgttcccttttaaaagggccctgcccacctcccatcctcctctctctttctttccctctccctctctgtctgttctctttctctccctctctcttccccctctcctcctctctcctgcagctcctgtctcttggagggctgtctcccccctccctttcccctttttatgatccctttccctatttaaaaacagcaacaacaacaaaaacgctcttcttgaaccctgttgtatggtgtctttctctcgagtgccgcttttcttaaattataacactctgtcttgaaaacaaacaaacaaaaaagaatttgggggttagtttttctatttatgcaaagaatatcattagaattttaaaggggattgtattaaatttatatattgctttggggaatatagctattttcatgatattaattctgctgatccccaagcatgagaggtctttccatcctgttaatttcttcagtattgagggctttcatttccttgcttaggtttatttctattttatctgttgaaattactgcggatgggattattttcttaattccttggtcaacatctttgctattggcatctagaagacttagtaatttttgcatgctgattttatatattgctattttgatgaaaacatttctgatgatttttttgggggggggaatctttagcattcctgaagtagagatgctgttcttctcctttgatataactttgcatatatataagagccatcaggatctcttcgtactccttgtaaccaggcatgctgatcagatgtcattgaaaaactccatgacattcattactttgggctatgagaggttcaaaattgctacttctgcattctttacccatcttttttatttgaatggaaaataaagttttctcatatactatattctgatcacggcatcctctcccagaactcctctcaggtcctccccagctccccaactcccgaccctctcaaacccacatgctttctttctcgtttgccttgattttaaactcatgtgattttacttactttcctcatctgtctctcctggccttagtgttagcaacgttgtcagtgttagtatgaatacaagactgtttgtgttgatggctaaatcctcaacagttaagataatatcttgtgtgaagtagacttttgataattatttgttgagtggataatataagaatgaataaataggtaaggcttgtgaaaataaaaacatcaattttagtacagatatatgattataccagagagctgagcaaatttacacacttacctggagcctctattaccatgtgggagggacaaggagaagggggcagggcagaagtggagacaaagatggcagctgtcactcccaactctacctcctggctggttcaagtactggtgcgtggacggcgttttggagagaattcaattagtaaaatgcttagtgtgcaagcatgagaattctgtttgaccctatgaacctgtggagaagatctgggtgtggtagtgcacacttgtcatcccagagctgtggagggagtgacaggagggtccccgaggctccctgtctaggccgcctagcttacttggtaatgagagaccctgtctcaaaacacaaggtgaggagctctagacaaagatacctaatgttctctggcttccaaatgcacaaacacatgtgtgtatgcacctgcacacatcatgaacatgtgagtaaataagcacacacaaacacatacacatacacacatacacacacatacacacatacacacacatacacacatagacacacacatacacacatagacacacacatacatacaactcacacacacatacacacacacatacacacatacatacacacatacgcacatagacacatacacatagacacacacagacacacatacacacatacacacacacatacacaaacatatacacatagacacacgcatacacacacatacacacacagacacacacatacacacatacacacacatacacacacatagacacattcatacacacacatacacacacatacatacacatatatacacacatacacacatagacacacacacacatacacacatgcacacacacacacacacacatacacacatgcacacacacacacacacacacacacacacacacacacacacacacacggtcagaatgtaagagtttaacaactgatagagatgccatgactgacagagatgccatgtcttcgggaggttatcttgattactaatcaatgcaggcagatccactcctacgggcagcaccattccctacccataaccactacccatgcagtgagaagcaggaagcttatgtcttagcactaattggaccacgctgggcaagagagatggagacacttgaggaatccagtgaggctgctgcccccctcttaggagggaaatagactggcggttatcaggatccgctgccttgtaacctgtgtccactctggtactcaaccttgagaagctgtgacctccttagctatggagtatagagaactgtggtgacacattgcttataacttactaaagcccctggagatcaaaacagcaaagcagccacactagttagctatagaaggcaggcagtgctgacacacaccttcaatcccagaactcaggatgcagaggtggatggatctctgagtccaagaccaccctgggcttctggagcctgaatcagagctcacgcctttaatcccaggagtttggaggtataaaaggttgaggcatccagtctgagagttattctctagccacgttgtggagagcatagcagtctgagagaatctgaggagcagtgaaggctcgcccctttggtctgagctgaggtggagggaagagctagtggccggctgctttgcttctctgatcttcagcttgaagcttgaaccccaataccagtctctgggtcttgtatttatcgtgttacagagaacagtgtgatccacctgtacattgtgctcaaagctcttggaaggaggttggcacctaggagacgttgccagttattacggtaatgtggcgattctgcgggacacctttagcatccttacaaagcctgaatcttaaagcggttcctttagttactgactcacgtgaatgtagaacaatcagtgtctggcagccgatttgttgtctgcagtggcttctggccagccagggtgggcagcagctgtcatgctgctggcttctgggatcgtcacagagagccaccgatgcctagttcaggtttgtgaagatgcatgcagcctgcaggcttggaggaatgtgtggaggcagagtcaaggctgccgctcttcataacaggataggacagatcatttcaatgtctctcctgccttggagttagtgtgttatcagataaacaacacccaggccccatagcaatgtccactaagggcttctttctaaatcttcaaagtacagaaatttagcacaaatagcccctcttcgtcagcatgcctctgtgtgtgtgtgtttgaatccatgcatccttgctcatgagtgtctcagaaggaggcacagcctggctcttctgctgtctggtttcctgctcctccacaagaggacagcccagtgattggtgctgtctgtgctaacactctgggatcagtgagtatgagaaggttatacacccacctgtgggctgtcctcccaacctcatcagagaatcccacatgtgaagtcagctccatttcccttttggcttctcggctgaggctttctggtgaagaattcctgaatatttaaccccctggaggagagtcagtgtgcaggcggagctctaacaaagcctttagtctaggtctggggttctgagcatatctttccttgattggcaacagcgcatacatttcttttttggttttttgagacagggtttctctgtggcttttggagactgtcctggaactagctcttgtagaccaggctggtctcaaactcacagagatccacctgcctctgcctcccgagtgctgggattaaaggcgtgcgccaccaacacctggctccagcacatacatttcatttcctctttttctttttcttttttttccttttcaggacatttgtttcattctctgaattttccttaattatgttttagaatcacagttaggatttgataaagatatcaaacattgtctttggcatgagcactaagagagacagagtgcttagaaagacagactggatagatggaccgacagacatatgggtggatggttggatagatggatggacaggcagatagatccacgagcatgattgtgaacttcttcaagagaatggctgaattctgattgagtccttccatgttggttgtgatggaggaaacagggcaactcttgggcacaatccaagtacctctgggttatctgatcagcaccattaaagccctgcctgtcctcactggccacagctttgactgaagctgcagcgtgcaacacagctgcctcatggtctggctctaaggcttagtctctaagaaactcaccacctgttgtctgtggtagagtattattttcaggtgtgtggcttttgtttatgctgcatttgtttaactctgtgaagctgtgttattttgcctgtctaaaacacctggtgttctaataaagagctgaacagccaatagtgaggcacaggagcagggataggcggggctggcaggcagagagggtaaacagaaggagaacagaggaagacaaggagcagcaggagaaaaaggagaggaggacatcaagggccagccacccagccacccagccacccagccacccagccacccagccagcctaagaatgaaagtaagatatttagaagtaagaaaaggaaaaaacccagaggcaaaagatagacaggttaatttaagttaagaaaagctggctagaaacaagccaagctaaggccagacactcataactaagagtaaacctctgttggtgatttatttgggagctaggcggcagcccccccaaaaaagccaaaggagaaaaaccagccaacaacggttgtcttagcctctcctctgggaagcagatggggaggagctgggattttggtgaggagaagactcagcaagagagggaggtttggacctgttaagagtttccagaatggaggcaacaagagccaaggcaggagtctggctttgtgccttgcaccaactcatcactgggtgtggactgccggcgtcaatggatacaaattggatgaggtgagtctcagcttcaagtggccaacagcctgtggaaagaatgtcttgatcctaaagtgggcctggtgatattatgacatcgactggagcagttttcaggaaatatttccttctagataggatacaacctctgtatctctgcttccattctttctttctctctctctctctctctctctctctctctctctctctctctctctctctctctctcctctttaggttttattttatgttttgggtgttttgcctggtacatgtggaagtctgctgggactggagttatgagtggttgtgagccaccacgtgggtgctggaaattgagccagccactgctcttaactgcagagccatctctccagcctcaggctggtatctcttaggatgaatgtttctctaaggaactctatctgcagacatcaaactgtggctgcttatgttgagaaagacctttctgtggctgtcaaagaagagtgaatagaggatgagaaagagttttaaaaaaatcaggttatttctgtccttgggcagattctcctaataggtacattaggaacctatatttactctctttcgagatctggagcattaacatccaacccagtgacctaagagactccatgtagccatggaatgggcctaattctaccctgccttggttcatgctgcactcaagctagactggatggctggggcctctgctttctctttgaaaacggctgctcacctgggagcagggtcaccgtgactgcatagcttggaaaaagggaagtcatattctgggatagtcttagtggtaagaagtgggttaagatgtagtcaggagaaccaagaaaaaaaaaatgtagatgctgtttaattgagactcttgcggagtctcacagggattttcttgcagtaacaaagccggaagtcagtagaagtcggtcccctccattttctccttcatgtccccttccctccttcatttcagtcacccaaataagaagcaaacctacctagcttgcacccttctctccacgaaactggtctccaatcagtcttctactgactcctgccgttagaatgcccacttcgaaccttttttcttattatctgcgctatacctatagacgcttccattgtttccttcctggctgcaccagcagctccgcgtcttcctctttctattgtgactttgctttctctcaacaatttccagcaaggtggaaactgttgagctatagctatctgaggaagaagtactttttatggaaatgagtcttggcatggctggtggggagtggctgaatcaccttgggaaggggtgagtgtctgcggggacccagagcagagaggggcatgcccatggtgagaaagggtcagaggtgggcaggacacctcttctgtctccagcttactggaacttcagcacagctttcaaaccaaagcagtccccctcccacccccaacctacaaaaacacccaacaaccgagggcctggtacaaaggagaaacttctttgtatttggaagtgaaagagagaattgggtttcctgttagactgaggaatgaaataggagaccagagaacctgatgggaatttgatgcctgagataagcccttggaagtaaggactccctcctaaggtattgctcttcagttcacgtgagttcggacttggaaaagaccctggctaagaaggatttaaagaaaacacaagtttccccacatctatacacggcatataataaacccgaggacaactcattctccaagatgtagttttaagtttccacctgtagtatatgctcaagaaaaacctgacagcacaaaggagaggacagcggtctctgtagatggcaactcgagagaagcaaatcacaggccgataatgaccagttagaaaaacatgttaatataaattgcatcatctggctaaggtccaaagctgccaatggtacacctccagtgttgttcatttgctattactgccatgggctatctgaacctggacatctttataaaggaaaaaagaatgtagctcagttctgtaagtccatgggcctggtggtcacgttatcctgggctcgtgagttcttgggagagcttatggtggagggtatcacaatggcggaatgtgtgtgaaggagagacatgacatgaagacacagaggaagccagagtgtgtgtgtgtgtgtgtgtgtgtgtgtgtgtgtgagatgtgtgtatgagcctcttgtatctgctccttgtcttcagttcaatgatcttgaacacatcatggtgcatatcctgatctctctgtggggggtgactcaagggccttcgtattgtgtcactggtcagacattacacactggtcttcagtctgtgctctctgaagcaccagtgtatctcttacaaatgtccccagtgattccatgcagcttcctgatggactctacattggatctatgcacaccaagttggtttcctgcatgccacctcccaccctttcctctcgtctttgaagctctagtcaggggtgctaatgaacactccccgagcatctctgtgctctgggagggaggctcgtgttctctgcgttatctagctacacccatacgttcttagattttaaaattttgtctccattattatttcttctgtcccccttttgttttcactcaagtgacactgtgtcacttatccagtctaagttaggagttagaggagagatttcttttttcattttgatggataatttttctttggatgtgtgcctgtatatttgactagatatttaatgaaacaaatattgatgatgtgagttagaattgtattcactggaattcttggggcaagcacacacgtggaagatcatgtgattagggatgaatgcaaagtcttcaaactccaattgtgcatatatgaaaacatgattacaaagcctgtagcaggcatgttgggtggtgtgcagaaggccctctgcaattacatcacgggcctttgaccccatttcaggagcagataactcacctctcctctgttttctgagtttgaggttccttgatccaccaaacagctggaagccattttcgatatttgcagaagaaccaacagaattgcttcaacttcctatgcccatgctaatttaatggcactttctttgcattagcctggaattgtaattggcaccctgtggaaatattagttatctcaggcacattaggagctttgatctccactttggtctttgatgaataaaacgtggcaattgaatttaatttacgtaaatgaagttcagtagataagaatctttttttttgcagattttttatttgaattagaaacaagactgttttacatgacaatcccagttcccttctccctcccgtcctcccctaccacttcccccaactaaaaccttacctatcacctatcctttctgctccccctggatggtgaggccttccatagggtgtcatcagagtctattgtatcctttgggatagggcctaggtccacccccgtgtgtcttggctcagggagtattcctctatgtggaatgggctcccaaagtccacacctatgctagggataagtactgaactactacaggaggtcccgtagatttccaaggtttcctcactgaaacccatgttctgtggtctgaatcagtcccatgctggtatcccagctatcagtctggggagcaagagctccccaacgttcaggtcagctgtttctgtggggtttcaccagcctggtctggacccctttgttcttcacttgtctttctctgcaagtagataagaatcttgcaaggcatgaggtctctgtggaaatgcaatgagaaatagatcccaatggtggaaaaactactttaaaatctgatttgtaaatttgggagcaaaaaagaaagaaggttggcctttgtgacgaagttttactttgtgcacttgaggtggcttttggatttgtccccctttctctcccaatctgaggcaaatccccaagatagccctcaccatagcttagtctccaccatgctgagacctgcctatgtgtattataaacctggtgagcttggaaatagagaaattctacaagacggtgtatgaagagtcttccctccatgcttcaacccatctaagtcaccattctcgaagtctgggtcagcaattgtggcttctccccacgtggattctcacacacgggtgagcgtagttgtgcacagaggcagcttatctcctcccccccccactcccagccaaaacaaacactccaatgaccaatgcagaaatgtaggtggtgggtgttgtggtttcaataggaatggcccctaaagactcatgtgtttgattgcttggcccattgagaggggcactattaggaggtgtggccttgttggaggaagtgtcactgtgagggtgggctttgaggtctcctatgctcaagctacacccagcctagtgtgtcacgagtctcctgctgccgcctacggattaagatctagagctctcagctccttgtctatcaccatgccctcctgcacactgccatgcttcccgccatgatgataacagactggacctctgcaacagtaaaccagccccaattaaatgttttcctttataagagttgccatggccatggtgtctcttcacagcaatagaaaccctgactaggacagtgaggatttgagggtaccatcttggaggtggccttgagcatgaacctacttacatgattcaagcaatttgtctctctcaggctttgctttgttctatgaagtaaggcttccaccccattttgttaggtcgtgttagatcaatgtagaagtccttaaatataatgcttttggactggggacataactcgatagtgtttgtgtcacatacatggagacctgtggataactccatagtgtttgtgtcacatacatggagacctgtgttcatcctcagaactggtatacttctaattccagccctgggtcccattggctagccagcttatttgctgagttccaggccagtgacagatcctgtctccaaagacaagggggatgactcctgaggatggacacccaaggttgacctctggccttcatgtacatgttaatacatcttcatgtgtttcctcgtgcaaataaacacatctctctctctttcacacacacatacacacacacccctgctttcttcaaagtctatattgagagcttgactctgccatgttgagaatccccctggctcctccctctggcacaaatctatcacctggcgtttttcttgcacacctaaaaatttcccattttctcagcacagcatctactccttcatcttccattttacctgctgtcgtgagtaatttcagtttgatacttatctatttccctgttctctgatttaagcaaaacctgtctgtttcatcattttcccagtgagttccatttgcttctctatagattcagaggtaactgtcatttgtgacaacaggagctctttctgagaaatcaatcaaaggacctcctgctggggagtagccctgtatccagtaaacaccaaaagcagagacatttgctgtaaatgatgggccaggcacagggttctttgctgtatggtgaggcagtgtgcttggaggggcctgagccaggcacttgattcttcagctatagtacccttagagatttttcctgtgattttccacattataatacatttcccccagaatatatgcttaatattctaaggttgtttcatgtttatcacatctcattctccaaactgagaggcaccctgatcttctgtaggtcagtgtttccctctggctgtaacaacagcccatactcccacattagacaccgagaatcaatacccagactggagtcacctgtctccagcaaaagcttcctactgtcctttaaacatgtgtatgcatgcgcctgcacttgcatctatgaaggccaaaagataacctccagtgttatccccagaagtgcagttcaccttcccgagggcaggtctttcactgtgctagggccaccgtgcctacccccatctcatcatgcttgacttcttccttttttaaaatgtgggttcaggggatggagctccggtcctcatgcttccaaggcaagcattttacagactgagctatccccctgtctaagttccctatctattgaacagttcatcagaatcttcttatggaaggatgaacactgggctataggcttgctctatggtatgggaggggacaaggatttctgtcaaagagtgattttgattaagtcattcctgcaccatgtactctgcagttaaatcttttcccactgacccagtgaagatggaaaatgatttaccaatagaagcttgggggaagggtgggcttggtgactggttgctctcttggatttcccatgagggttccaatcaagacattgtgcaacgaggggcagaatgagaattcaggagccaaagcaggggtggtcaggaaggtgtgtggagggaggtaggaagcagggaaggaaggatctctacttcccaataacactgacctctgagagagccagctttactgctgctctcctttggatctacaatgaccccaacagttctcagtggtgaagactgggcaccatgcttcagcactgctggaaggcagtgtagcctcgaagaaatggggtttaaagagaagttagggcattggggggggtgtgctctttgaagggactctgtgaccctggctcagcactctctttttcactcaatggctgccttggaaggggtcttcttcactgaaaattcccaccacaaagttctgtgtgggcagatgcccagagccaagaagtaggagaccatggacagaagcctctgaagccatgagccataacactgtttccttcaataacatgtccactgaggtgtttacatcagcaccaagctcaccatgcagttgctttagttcaggggagctctgcagggcatgggaagggctccctgtcactcagctttatttggtcccttatcaagggtgccgtataacactctaggatcaagcccacagcacagcatggaggaccaagcacttgaaccactctaggaaagtgtgtagacagagtgaaggctttccattgtctgctgggcccagccttgatgggtggtggtgataaaatgaacagactgacaaattatccaacagattctacagttttgacaggcttacattcggatataacttgctttctagtccaaaaccctttcaaagggcttagctcaagtttttttttccatttctttctattaaaatatctactttgtatatctttcactgagaaatttgaagctacctaaattcccccctctgcaatagaactactaatgttcttcattttaagttccttaagtgctctgccaagcagtagacatttattaaatgatcaggttgttcatgaattcatatcttttctagattttcccatagaaacaataaggagggaaagacacattcttgaattcaggaagctgaattcaacccaagctgcatctgttacttgtttggagtctgggcacattacttaatgtctaccttagtttcccaacttgtaatatagggcaacaatggcacatggtagggatcataggacttgttagaacatgctcagcttgatgcttcagtaagcattgtaaaatgctccccactactgttctgtatagctaaaaataatattagtgtatcaccacaaacctctgtggggagtcatatcattcataaaacacattgtgtaatggctaattttaatcatcagttctacttgactgaattccagggggagtcctatcaggtgagttctgatgtaatgatggtatgacatttgatgaacaacaaactctatcccaggatgacattattgagatgtggtaaaaggtagaatgccgacaaacaggggcactgggagtcagttcttgggggtcatcttgccttcatctcctgtgtttcctttttttgctccctgtccataaagaaatgaaggaaagctttcaccacctgctcccacaatggcccttcactcaagtgtatgaggcccaacagccatggaccagatcttctgaaactgtgatcccaaatcagcccttctccttttgtttatatcagacatttttgtcacagcaatggaaagtaaccgatacagatagtccctttcttcctgaggaataatgatgaactatctataggtgctcattgttcaaaggatgctgcaaatcacaaaggaataataggtcattttggaaaaggacagtgtaaaaaaaaagactgagaaaaaatataaattgaagactcaagatacagcactagaatatggctgttccagtcttcttagtgtgcaggagagcagaggagacagagtgctcaagactgaatgttgggactagaaatgccctgggaatctgacacacatacatacaactgataaaccacccaggaaagaggtctgtttccattttcaccttcttctgcttttgtgtcgtattgtgtgatattttactaagcactaaatagtgagtttccatgtaatatttcactaaatacttgttactcatttgctctttttccttttgcaaaaataaagcctctgttcagtgccaacgctgcaccttcccctacctgagttctaattatttcactcatttttatttttcttccttccagttccctccctctctcccttcctccctctcttcttccttccctccatcctccctcttcctttccctcctccctccctcccttctctccccctccctccatctctccccctccctccatctctcctcccccctccatcccttgttcatctctcgttttctttgagataaaggtctcttctgtgtatctcagtgctgctgaatgagtgactctgaattctgtctccctctcattgtgtgctaagacctgactgaggggttagtaagggagactccagattgtgtcggggacaaaacgagcatctccccagcagccaggctccacgtgaaccggaccccaaccctccctcttgaaccaatggctgctcatcactcctggtattatatccgagctcctttgtgtgtcccacaggtccccattctatctgtccctcccctcccccgtgcctacttcatcctcatcgtctgtggtctcaagcgatgcctttctgtagctacaaaggctgtgtttaccactgctgcaatcatgtaccgtattctggaatgggaagcccttgtgtctgctcctgacttggggtttttctcactcatggcatgggttcaaggatctgcacaggaaattttctgagctcacagctgaggatgcctcccctgaaatactcacactgtattaatattatacgatcctctaaatagtagttaagagtatcacaaagtgcctccgagcccctcagaaattagtagggagatatatctctggagctagtcagacaaatctgggagcaggaaggttcagctgggaggtatttgagtcagacttaagtcagtggaatttccaaagcacgtggacaaatacacttgggtaagtttacagtgatatttctaatatcaccaggaagcaaatactgtcacattagttttaactacttctacaaacatgtggcccctgaatagacaggcacagctgtacctactgtcccagtaaccaaaatgagcacgttcctatttttagcaagtggacttagttaatacacttagcaacggaacatctgtgcctgtttaagggcgggctatggttcttgaatatcagaccatttctaaggctatgagaccatggctctggattcagaccagcagaaatgggcttcctgctctcccactcaccagctacagactgaagataacttgctcatttcttgagtccttagcccacttatgtatgaagtcaggatttgagtctccaggttattgaaagattcaaaccagacagtgactaggagtgtccttggcatacttgtggttctccttaaatgaagggacagagggaaagagctgtgataggctcattagcattgatttcttaaaatggtttatttaatcagtaggttacaatacataggtatggggaacaaaacagtcagtatacagatttttctatggggaggtctgatctggacagtaaacacatctgccacctcaaatatgaactttatggtgagaacatttgaaatccacttttgtagatattttggaatgtaacacaccccattaagtgttattattatggtgtgaaagtgggtccccaaacccactagtgtagtcaaagctgtctgctttggcccacacagcccctttcctcctcaaccccggtcccagcctagacaaccgatgctgttccttggggctgacagtttcaggttctgcacacaggccacgccatgtggagtgtgtgttcggtgcctaacgtgtcattctgcacagtgtcttctatgtttttccgtgcctcggggacagaactttctgcgttattagggctggcagtcttccaccaagtagggaccacttcctgccagtgcgcactgctgggttccacaccttgactgccgtgaacaaggctgcagtttacactggagtttgggcacttcattgtccctactacttccacaggagtgctggccgctgtctagagagaggatcacaaacgtcattctaagatggaagacagacaggaaattacagcagctttattgaagtgaacagctcctttgggatgggaggggactcttgaaggcagggtttaaatgagttcaacagacccaagataaatgataaataggtgtttgattggggaacagcttacacagataagagttaataactgccgtggccttcctgctccagaagttatggtctctgttcttccaatgctctctgagacccaagagccagcagctcctctaccttaaaggggtcacatctgcaccagaaaccatgcccaaagagtgtggccactactacaagttcactggcaaggcaagatgcccctaagactcttgcttgagtgttctatgggcctcttgggtcctctgctttttttgttggtcctattcagacacccacccccattccttcctgctgtgtctcctcgcagtgtcttctgggaacagaagcagccaccacagagctccttctctcaattttcctgtttacctatgtccctcctactccccttcactactcaagtgactgcaaattgaatgcaacactacaaagttattctttgtagaaagaggaaaagaaaaaatctcaagatttgtgtggaatcacaaaagattccaagtagccaaaaaaagtgataaaaaaggatcaagctgaaggcctcacgctaccagctttcaaaatatattataaaactattggtgtgatttgaagttatcttttgaaaaacatcttcctccctccctccctccctccttccctcccttccttccttccttccttccttcctctctttctccctttcttccttccttccttgcttgcttgcttccttatgcttgtatatatgtgtgcgcatgtatgtgtgtgtgcatgtatgcgtgtgtgcacacatattcctcagcacttgtggagaccagaggacagcttgctggagttggtcccttccttccacagcgtatgtcccagagaccacacacaggctgccaggcttgccaggcactgtcccctgctgaaccatcaccctggtcctactgctatggtttagctgtggtcctcaaccttcctaattctgcgacctgctaacaacacagatcctcatgctgtggtgactctccaaccataatattattttccttgctactttataactgtaattttgctactggtatgaatcatattataaatatttctggagatagaggtttgccaaaggggtcctgacctataggttaagaactgctggtttggagaactctctggcaagggaccataagcagcagaggcttggttctgaggagacagtatggtgaccatctgtggtcctttgagaggtgaagcctggtgaaggaccttgtgtcagtgagggtgtgcccccaagtcagtgagggtgttcctgcctacaaagcaaccatggatcccggtctttctttccatactgtgttttttcacatgctacttcatggtatgtcagcatctgtcatccttaccagaaccgagcccatgcagataaaatgtctttgagtctcttaaaaccatgacttttcatcttttaaatgttatcttcctcaggtcatttgctatagtgatgacaagatgactaatacagctttggtaaacaaccacagcatggtactgacataaaccatatattaggcagcagaataggtttggagatcaaagacatagacccacatatctgtaatcaaatgcttttcaagaaggttccaaagacacacaataggaaaagaaaaatccatctaacacatttttctggaggaacattattcacacgcaggagaaaaaaagatacattcttactctgatagctgatttaaaatcacttaggagattgggcaggaatgcttctgggtgtgtgttatggtttttccagagaggatcaactcaggagtgaaccccactctgaccatgggtagtaccatccatgggataggagcttggatgaaataaaaagggagaaagacaagccctctgggaactggtatttctcttgtctgctgtaccatttcctctgtgccaaggtggtatgagccccaggaaactgaggtgacacaaacttttccgagtttgatttgcttctgtgaggcattgtggtcacaggggtgtggaagtaactaatgcagctggctgaccccttgtcaccacaacatggattaaacatgggaaactctaaaacatcaaaacatctggagaaagctccacgattcaggtctgggcagtcatttcttggatttgatcccaagacataggaaataaaagcaaaatagacaggatggtatcaaacttcccagtcacgcagaaacacacagccccaaggagccaacccaaataccaggaaagatacttgtaagtcataccttgaaggtgcctgatatccacaaactacccccattaaaaaataggcagaaaggactggagagatggctcagtggctgtgggtgcttactactttcacagaggactggagttcggttcccagcacctgcatggggtggctcataactgcctataactccagttgccacagatctgatggccattctggcttcagtgtgcacctgcgtatgtttggtgtacatacatactactggacatacacagacacagagacacacaactaaacaaatgaataaatacgtattttttaaaaaatgtgtcttaaaagataggaacttaaaagatggatcagagccaaggctctgtcaactcatactgcaccttcatgtagttgatcagaagggcacatttgttgtgtgatgtttttgctcttttggttttttggctcttttggagggagggcctgctacccagatctcaagtacatcacacatggaggcttattcttagttatggatgcccagccttagctaggcttgtttctagccaacatttttttttttaatcttaaatttaaaaccatcccatatattgttgaccttggggctttttacctttcttacttctgtatatcttactttccttcttactctgtgactggctgggctgctgggcggctgggcagctgggtggctggtcccttacatcttcctctcttcgttctcttgctgctcctcttctttcatccctccttctatttattctctctgcctgccatccccacctatccttggccctgcctcacttttggtcattcagctctttattggaccgtcagatgttttagacaggcaaagaatcacagcttcacagagttaaacaaatgcagcataaacaaaagttacacaccttaaaatagtattccaccacacacatttccttgatctcggaacacaggagtttgatggttcaatgaccagcatttgtcttgtttcctgtgagactgaaacattccatccaagggatgttccttgagcaggaaggaaaacaactcaaaatagcttcaggaagtccctgaagctgaccagactcactaggccgctccctgccagagtaaacaacaacaaagccaaggtataaggaggtctctgagaccagaccagcttctagaagaagcaaaccccagctgtgttgcctagaaaccactcagtccaactgaggcacctggaaaggacactttccaacctgttgagctgcctataggctgtgcagtgtgctccaggttcccagcatctgtgagctgtcacccatgctgagatgggctttggtgatgcagctccccgtgagtcatttctactcctgtaggtcacccctcacccacattcctgtgtgtgacattatactcattggcttaccaagttggactttggtagtggtctgtcttcagtctatggtaggcgtcctatctggggtgagtagacacgtgtgcaatgtctccccaggaaaagttttgtcacacaatagggtttctgccccagaaccagatttaccacctgctagatgccttgtgcagtgccaatgggctggaaaatgggacactgccctttcccaaggggttaccttataaccagtgatgaagagcccaactattcaagacactgtggtgttaacttctcatcactggtccaccactgtccacactaaaaacatcacacctgggacagtaagtacaaatacattctatgcatgacacagtttacttttgtaattttcaagatgaaaaaataatttgcagttgtttttttaatacctccagcagggttagaaagtaattagggaagattcaatatcatgcccctagtcagccactgcctcccttctgcctaaatggctgattggggtctactggatccaaggggtagtgacagcggccacagaactgtcgataataatttgaagatcatttccaagtacctgggccagaacttcaaaacaatgtcttaccaggtcactgtaaaagctcccacagagccttttcttatctgctttgaacaagcaagtagattgaagaagttcactggaggtggggacctgttcatggggacacagcagattcgctctgtctttgaattaaagcccagcctgtttgcttccacccgtcaggccccgagggaggagggggacacacagagggggaacacacagccgcctcatcccagtctttgttttgccatgccaatgtagctaccaatcagatgttttcccattaggattttatttctcagtatttcagccacacaacaaaatcgtccgtcatcagtaataagtatatttggaagctcattacagagacacatggatagtgtgacttgttctcatggtgactgttgtctggtttctcagctgctgtactttgaagcagctcacaagaagacagcagaggggactgggtatggcactcgcttcaaaagcagatggaccagagttcagatttccagcaccaatgtaaaagctgactaggtgtagtgactcaggagtgggaacaggggatcctggggcagctgctggcttgagtagctgaatcagtgaactctgtattcagcgagaaaccttaaatagagtggagagtgatcactgaagactctgggggccaacttgcagcctccacatgcacccatgcacccatgcatgcatgcacaccagtgcacacatgctcctccacacatgcaaatgtgcacctacatacatgcgtctgcaaaaataaaaggcagcagagcacactgaatgaaactagatgtcatagatgggtgctctttcatcatgttcaaaatactatttcattttagtttttatattgtcttgacaaatgagtatgcaagagaaatatgacaaaagcagacatgaactgtaaatttagaacatgagaaagcaccctggctgtgattatattgctatcaatcataatagttgaagtctacgatgacgattttgtcattatatcccactgaaatgccctctttaagagggtgaggaaatttgaacgatattttagaatactttaatcacaaattagactgagtaacaaacattttatgattctgaagtcaaactctgagaatccatcactccgaaagacactttctctaatggctttggtggctgtggttgagtgaatcagaccctcgagcagctggtgtttaatagattcccagagcttctaggagtcatttcttggctagcctgtcactctttgcggttcagcaggtgtgatggtgtgttcttagctgccttttctaggtcattctctgggatttgaatcagttcaggtattgtatagcccagcacttttttttacctgtctctccaagagtgtggtatctacagtgtatcttggaggtatcttctcctttattcccttttaaaatgattttatttatttttgttatttttaaagttcaggtgcctcagagtccagaaggcagctttggatcccagactcggagttacacgtcattgtaggtgcctgttgtgggtgctgcaaactgaactagggttctctgcaagagcagcaagtgctctcaacacctcccacccccaggcatggcctcatccctccttttcttacctttaagagagatatcaactcctgttttcatcaggcttgtagagcctgaccacgtcatcatgccacagagacctgtgggcttggccagaacatccctttcaagctattggttcagggtttgattcaaaccacactaatcagcaggcttctttcctcctgctgggatctctagctgtggggatgatgtcagccaggctctggaggtcgtctttgatatacacagggagaggctatctgagaataaagacaacacagcagagcagagggcagaaatgcgatgacataatagaaagatctggtaaacatttacccatgctagtgttgaatgcggcccttttgattttataggagccaatgctctgccatgttcaatactttattatataaactactttgagtggctatctggcagtttcagaccaaaggatcctcatttcatatgcaacctaagactttcttttctacacatgaaataatttcaagatcacagagtaagatgagataaaactgaactatgtataaaaaccatacagaccacaagtcatcccacagtaaaggattctgaattcagcagcaagccagctctcagatttcctccacaggcatctccttgatggggtatttctgccccaccgtagctggtagcaattgttcttatttgatcttaggctgcttctctcttgctgaggaggctgggagccccaagctgcttttggaaggcagaggtcctgaagaaggaaccagactccatttcattaggctcctggagttgtgtaggatctcatacagggaaagtgatggttctcacaaacgttcccaagaagaccacagtgagagcgcagagaagctgattttggtcctggttcaggaccatctggaggaacagctgtggaagacaaggacatgtttatctcttctgagaggaaatgtgaataggcagggtgtgcagggagcaccgcccggcaaaatagaggccagttcccatcatccaaacttggggtgggaaggagctgaatcaaaacacagcgtgttttgaaatcaaatagctagaagggttgtgaattgaggggttaggaaggagctcagaccatgtagaccattagtcttgatactcccagccattaatagcagtaaggaccaagtgaataccgataccaggtggtagcctctccactgcacaaacacaaggtttttcctacatcttggtaggccagctcccctgggttttgactggggagatggtgttcttggtgacctgaataagtcactataatttactatattgcatatgagcaagttctgacttctctctgctttggcaagattggaaaggtcacactgtgagtttcttcacaaatggactgagtaccttgggctttggtcttccaaatgcttgaacatggtaaaatgatttttaaagtaactgcttcgtggttcacaaaactaagaaaaacaaaaacatttttagaatttttgccatttgaagaaaaagatagaaatagtggttgcaatttagttataaaaaccataaaggccacttccttttcattcttgcagttatgttgtcaaggtttgccctccttagaagttcatgaggcttcaggagaaagaagaaacagagcccaactattctgtgcaaggcatattctatcagttcattttctagttgtccttcatgagagaacactccgaaagatcaggtctgagctgcatcaggtctgatgatggaaggggtgtgttcaggagggtgaccaacctttgcaaaacatggctttagctttatatgaaaccacttctagacaaacacggatgagtgattgaacagcagcagggcttcctctatgtaaatacggaaccctggtactcgaaaaacaaactcagagaaaaacatgattaatcagcttgaatttcccccttctctcaacattctaaaaggacaaacggataacacagaggaatgcgttcaaccaggacaagtatgacagagttctgggttgccctcaataaaacccttcggtttatttattccaaagttctgatgcatattacgtgtgaaaatagtcaaacagagaataatctcctaattgccttccctttaaaatgttgcctgttcaactgctggttgactcaacacatgtgtgtagcatccttttgtggggtagacacaagtattgaaatactcctggcagagagccagcctacctgtgaatgtgcaaagcatttttggagaaggagaagataaagacttttagctcgggggtatcatattaacactgcaaataaagagtaaacctaagtctgaaacatacttcaaataggcagaaaattagaagagaagaattcttcttcctaggtttgctgctgtgattttcttcactgaatgtttagtgtagcccgaatttgcacacacgaagctgttctgagagagtcaggcgatgagcccctggctcctgtgggctagccagccagcacctcatacccgagccagtagaagagagggcatttgttccgtttctcagtggccagccatcttttctcccttctgctgtcgatggttttgctttcattcagagatgtttattttgcaggattgggatgggaagggtagctttcaggtttaaaaaaaaacagctccgttctcctaggtgtaacgaaccatgttaaggcactgaggtggccgatgtcagtttgcctctcactggagggtcccttgcacgcctttaacagcaccaagcactgtatctaatggtaatggttaatgccgaaggtgtttcccacactaccctcatagataggcataactgcatattgaaactctcaattgggtttcatgtgtacttaaaacaaacccatgttgacaaaacttcttagtaaaaatagcttctcacctatcgaactgaggaaaacctcaggggcagagcatacatgatcgccatctcagagactaggaaagcatatgtgtgtggcatgacagacacaactgaaaagtcagtattctatgtggctgttggcctattactaggaacctggcagtcatactcggtgatttgaggattatatgtaaatgagattttgaaaaccattaaaaagcaatctctcagagatgttattttttaacacacatgttcagagataactagcagattgccctattcagataactagtttcttaaaagatatgctatgtgcgtatgtgaagatcacctaaacaatattataaactccagtggaagtgtttgaaaattcctttatttgcctatcacattctctctttatgaaaccaagccgctctcatatcccctctcaagtccacctcttacatttacaattaaggagcctggggaatctcatgcccaaaatgtggcaccatggcacactaatgatttaaacaagggctggacggtcatcaggtacgggagccgtctgacactcatctgaaagagagaacatgatcctctgtctgtcccttgccatcctattatctctctctgaaggagagtgtgagggaaactacctctggatgaccttccgtgggacagcagccgtcccttgagttcattcaaactccaacagtactctttctacaagctgagttggactgtatatgatctcctagaaatgtcaaaatgatgtattttcccattctcctcctctcctgtgtgtaaggctctgaatcaggttgtgctggtaggttatgatatcatgtagttgactccatgcacataataggtttgtgagtcctttatccaaataatctgatttttccagttcattcaagagaaactgggaaggggtagaggtatgggctttctttgcccatcaacaacatttggaatagttgtaatgatataatatgaacttataacatttatgtgtttattagtcagctatctgttactttgacaaaacacctgagataaacaacttatatatttgtaattacagtctgtgattacttggctctgtcgctttgggcctgtggcactgtaacacatcatggtgggagcatgtgacagaggaggcctgtgcatatcatggtgtgtgggaagcaaagaaagagacaggaggggtccagggtcccaatatccccttcatggccacctgtgcaattatttaaattcctcgtggtaggtcacaccctcagggagtttccactacttcccaatttcaccatggtctgggcaccgtgcctttaatacatgataccttaggagcacattcaagcccaggccatggcgatgagagccccctcactccattctgagagcattcttgctgttaccagtactgcaggctactgccttccattgctgatttttaagaagtggaagtgttgtcaccactacagtgtttctagatgtttcaatttacaactggaaggtaagcataggtttatagatagttaattttttttttctcgagacagagtttctctgtgcagctttggagcctgtcctggcactcgctctggagaccaggctggcctcaaactcacagagatccgcctgcctctgcctcccgagtgctgggattaaaggcgtgcgccaccaacgcccggtgatagttaactttttaaaattcaaaactaactgtacttttttgacttttaattttaaaccctatattttatgagcataaagatgcagtacagttttatgaactgaggccatgtgataacgagcacctagctctgagagcagaattctacctcaattctcctctcctgcctgctgtgcctgaaggatttcctgtctgtgacctgattcctgagttttcactttaaacccctcgaaggaggggctgaagagatggctcagtggtaaagagcaccagctgttcttctggaggatccaggtttgattcccacagggctcacaactgcctctagttccaggagatgaccccctcttcttctctctgtgagcattgcatacatggagtgcacaggcagacatgcacacaaaacacccatacacataaaataaaataaaactaaatctcaaatttaaaaatatatcataaaaacccctaggtcaaaggagagactcctaaccaggagtgtcctctaccaggtctgttccccacggagtctgttccctcacctctttccataatgtctttgaatgctattatgtattgtactgttgtatttatttttatccttttaattcttccaggcattccacaaaggaagttcctttttgtagtgaggaagcatgacctggagaatgagaataggctcatcatcccatcctgtggagctctgctgtaggagtagaccttgagcttggtcaggtactctaacttctcagctggtgtgatgggtaactgcccagtgaggagaaagttcagtcagctctcagttccaggaaaggcctcttgggatgtattgtccagagatttgaatttcaacattgctaagtctgttctagatgtttcgcttcacataaagtcaggtatttgttgattatagctgcacagaagatgcaaggtgaaaccacctttcccatcagatccatagctcagggcttagccatctgttcaatgaattctattctttcttggaggattttacatgtgttttgtggaaaatggctacaaaggaggcattaccttctccatttattatattatacaattattacattgtataatcatatacttacataatgatatatatatttataaaatattacatagatgaggtaaaacttcctgagactgaaaaggagacgcaggtgttggtcccatcacattgctgcaggtgaagaagctggtccaacacagtagcatctcgggtctcagatcctttatatgctatgccctgtatcaagagtcagtgtggcagagagaggtgtgtggatcattccccctagagagggttgataatagccatactacagccagctattttagactatttgaagaaatgtttttagttcagtttcccatgaggtaggcaaaaaacaaatcgagattatgagactaatgagctgcttactgcactaaggaggctcccctaatcgctgagggagaccagtcccacgtggatatgttttgaaagggtcaactccccatggacaggttctcttcaaggactagaattggccaggttcaattagtactgcctggacaaactgtgctctagagtttttactaaatgatgtcctttctttgagatatcattttggtaatttcttttgtggataaaaggcaaatgccatgtaattctgccaagtctgttgagctctctggaggtaagggcaccaactggaaaagctttcagaactagaaagtcatgcctttctttcaagaaatgacggatggaaggatgatcaaaatctctttccctgtgctataagtgaaatcaatttaactggaaatgaaaatgcagattcctttaaaacaccccttggtcttcttcatttgcatattgttaatttccattttgattcatctctctgctggttttgtttacataagtaaaaaaaaaaatctgtctaagccaaaagcattacactaaggacgctggtcatctgctcctctctgtgtcaagcatttaattctaagtagtaggaaatttttagactgaatatagacattatagtatccttcaaaatctaagaaacaccccatgtaattatgatacacatatcattaatttctcaagaatgtgcattcccagggtgaagaaatcagcacctttagcttcttgtggagtggcttcagtaggaaatggtcctggaacatatgtggttttcctacagatttatttaatattcacagtgaatcactgtgctgatcagtgttaactgtcaacttgacacaacctagaattagctggaaagggtttcaattgaggaactgtctaaataaggttggcctgtgggcatgtctgtgtgggaaccgccttgactgttaatggaggtgggaagatccaccatggacatgggccgcagcatttcatgggctgggatgtgtactgtaaaagagtgaagaaagctcgctgagtgcaagaacagcgagcaggcagccaaggcacatgcattgttctctgctcctgactgagaatgtgatgtcactagctgcttgagttcccaccttgacttccctgacacgatgaactgcagcttggaattgttagccaatcaaatccttacatcctccaagttgcttttggtcaggatatttttttttttttaaatcatagcaacagaaatgaaaccagagcaacatcgaactgacttactgtacaggaaatggaaacagcattgcgttcagggttttacacaggtgcctgaaaaagttaaggtaaaaaatactgtttgtttatggggctggggagatggctcggcagttaagagtactgactgttctttcaaaggtctccggttcaattcccagtgcccacatggcatctcacaactgtctgtaagagctccaagatctgacacccccacacagacataggtgcagacaaaatatcaatgcaaataaaatttaaaaaataaataattttttaaagagaaatactgtttttaattggttagtcatttacacaagtgttcaaaatacaacaaaacaccaagtgtgtaaagctggtatcactaacaactaagtgcacagttcacagtagtcttgaggtaacttgtcaacatcatctctagcatgcttagttatgagcagcagggatttgtgaacctggggaaggtaagagagaggtcactccttgtgctaactgcttcatcagcttagttttcttgctcaagacttcaactttgatggttttgaataagagtaagcgagaggcatttggtgaagagtatttcacttccaagtgctacttctctcttcctccagtctccgtcatcgaggcatccatgttttgttatgtagaaacatgtttatctatattcaacacagggaccactgctttcgacattttctttctgttcatagcccatctaatttagacccaacactttgtcttctctgtaggaggatgaatctgactatagaaaagaaagaaatgtctgtctgttgaccctatcgtataccaggtatacgggtatacggggtatactggattaggaattgatgccgcacaaatggctggtattatctgggggaagtgaacacaaagtctcaatagattttctaggctggccttgaacttgtgattctcctgcctctacatcctagatgttgggctatgtctccatcaaagcagccacttattaataaggcgactctgggaaagctgcttaaccattctttggtgcactgctcctgatttgtagggttgaggagatttggctgggaaacttccaagtctcctcttgatggtgaatgcatcccctgtgagcatcaggaccatgtgagctagaattacacattacttctgcctctgagtattcacagtccaatgaaggtaagggtaattaccacttagcaagtagaaaaatagatataaccatgcaattgataagtctccattgctatgtgttatgcaaagaactgtggccccctcttttttgagccctgtttcatggcttctaagacaacactctccttttccctcttgtctcctgactctttgctatctgtgctaaatatttatatattcatttaccatgttccttttctatctttgtatgctgtctccatctatgatctaatttatctttctcagtgttgcctgtgctctcctggtccccatatctctacctggagctgagactttgcatttgatatctactttatatttctgtctattgcccatttagtttccatgtttgtgtagttcactgtcacttgaatttctacacatcttactctttgattttttttccttttgtcatctccagtctccttagcaaagagcccagtttcccatttatctgttggggccttactaatgttcctatcaatgtacacagattttcatatctttcaagaggttagagtcttcctctatcctaaatacacccaaacatttatccttaggtatttttgttttcattgcctttttttgtgtgtgtttctaattctagacttaaatcagccattgagaaagtggctcccagcccctgaagggataagattaataaatgaaagaggagaaacagcactactactactaaaatcgtgatgattttaaaaggtgctaaacagcatatgttggatgctaacactgtttgaatgaatgcgatgttaaaaagcggtgctgtgaggttttagtcatgatcatgtaaattgcacaatacatttgggaagaggtgagagctgtgctcctaaactaggagctatggcctttgattcagcctccctaaccccagttctggaaactgaatctagggcctcacgtgtgctacgtcttcaaccccgatccctttgagagatacctcctattttgagatgatgtccaactaagtttcctagcccagcctcgaaagttactcttttaccttctgcagtcttcttgcttcagcctcctgtagctggagtaacaggccagaaccatccagcttggcccagctgttgtgaaagacgaatttttatatgagaatgtcatcgtcatctgtatgccatctgggatgacatggaacaagggaaacggactccataagggtgactcggtcttgggacattagcatatgagtcattgcatctaatgttgaggtcatttttttaaaaattataattatggaatggattggtcctggttctggcataccaagataaattaggcccaagagctctcttttgtttgggtcttgagagacaggtcaagcctccaggttgggtgtggtgggtggcatcgtgtttgagtaaaagaagtttgtggaattgttgggagggagtaaagagcaaattacagaggtgatttacttacaatgcctcgatgtaaccagtcctttgtccttgatggtgcaaagtgtacttatagaattgttacttacataactgttacacaactgttctgtctgattctcagagcagtttcaatggtgtgaagctaatattttctttaaaaatgaaatttgtttaatttttatgtgtataagtgttgtgtgtgcatgcatgtatgtgtgatgcatgcatacctggtacccacggagatcagaagagggtgacagagacttgagagaagaggattgtgaggcattaggtgggttctggaaatcaaacccctgttctctgcaagaacaacaagttctctaaccactgagccatctctccagccccaaaggctaatattgatcatcaacatggcatgatctcaaataacccaggagacatgggttataactccaggatgtttataagggagtgtctagataaggttacttgataggtgggtggtttcttctatgggccagggttctaggctgcatagaaacaagaaagcaaactgagcacaaacgtccatttctctctgcttcctgactgtggtgcagtgtgacccgctgcctcatgtccctgccaccatgatagaatgtgtctcccaaaactggcaaccaaaataaaccctttgcttacattgttttagctaagtatttagtcacaatgatgagaaatggaactaaggtagattacaaaacagctagcactcggttataaataggtttcatgttggatgatgcccccagttgtcatggaatagaatgtcctcggagcatttgaggtaggcaagactcaggtacaatgtttaggagggtctgagtattaagccattttcaaactgatattttcaatttacaatgggtttattggtacgtaatctcattctgggccctggagcatctgtgcaaggagatttgttttgtattaaaccaaatcatcacagttgggaggcagctttgaagtctgaggaggctctttcccgtaactgttggtggtttagtttaattcatgggagaacgcagatctgtcaaaggcaatgtctggagacaacagccttactgagagcaaaacaggaacctggtatggctggggcaggggtagatggctccctagctccctagaagggtctagtgtcagtcagtgacactcaactctgtacccttggtcctcattctgcatcaggtgctcacagtgcctgggctctatactgctgcatgtccttgaagtttcctttagcagtcacacccttacctcactggtaccccaggcaactcagaggtctgaagtccccattgtaaagatgtgtgattccaacatgaaattgcttccaaataccaaagctggttgatgttgtactatcgcttgtttcatgtagcatgtaagttttacaatccattatggaatagtgatttcctagtctgttatctgcatggtgtttagccttgggcagtgtagacattttcacctgggaatatgtatacttcagggttcatcgttgatagcaacattaattgcttctttaattcagacaaaatcaatttaaccttttcttattagctttatttttaaagaaacaacatgtatttctggcaggtccatgtgagttttcagaaaagcgaagcaatgtctttaaggtacaaaacacagtatgtgaaaaacaagcccaatctttgcatctttccatcttggattaactagttggtcctctgccactgcaggatggaggatgggtcatctatgtgacccagcagggaagctaaggctggaagacacagcttaactggggtgtgtttgatagcaggcttgggggagggtaaataggatagagatgaaagaattcaatgtgacattaaaaattaggaggaagtcaggcaggttggctcatcaagctaccttcctgcatccttcgtcttcgggtatcaggaggccctttttacaaggcgctcttgtgactagttcagaaaatccttcctaagatgtgtcaattgcttccataggaaaatgaaagggaaagtacctttcctcaaaccccttcactgtaaagtcctcattgtgccaaggggtctgtctcgctttgggatagaacccagaacccacataaatactcagctacagaaaataggaagactttgtctaaattcagactatgtaagggggtgcttcgggtggtaatggggttgctgtgtgagcatgaagacagaatccgaaccctagaagccaggtaacaaggctggctatgatgaaagtgaatttctggagtcctggctctggggatgtgattacaggaggatcccaggtgctgctggccaggcagtgtagtcaagtcagtgagctccaggtgagcaagagatcttgtctccagaatcaaggtggggagcaatagaaggtgctaatgtccacctctggcctacaccacacacacacacacacacacacacacacacacacacacacacacacacacacacacacacatacataaaaccctatggaagattacaaaatcatatttaatataaaactagagtaagaatccatctaagaaattagaagacatgaatatcaagtctgagagtagcaggcacgggtgtggctctcagggttatttgcaaaccgtatctctttctttgatttcaaacaattggaactcaaaatgaattacatgacaccagtaaatattccctacagtgctaaccagcttttctataaacatccccatgaagtggaaaaatgcaggaaagatgaggaaaaagtgggttgattccactgagatcttctggtgtgtgcaaaggactcaggaggggccgttcggcaggaagctggtctcctgttctgtgagaaacctgggcattttgttctgtcacctcagcaactcctttcttccaagtagggcaatttaaatggccttaaaggaaccagcaatctctgtctgtgaaactcagggaaacaatactgtttatcgagagtcttggaggcacctaccattttttgttctgaattttaattgattgttttgtgtatgaacattttttcccatatagacttgtgtgtgccaagtgtactggcacccttagcattcagaagaggttattggatcccctggaactggacttcaagttgtgagccaccatgtgggttctgggaattgaacctggaagaacagacagtgctcttaatcactgagccattgcccttattgttttagttttcataggaatcaagtctgagattattctggaagctagatgctataacttcaggtaattcttattttgtagattaaagagtatagacatttttcatcactgtcatcatcatcatgattttgagatggtatttcttatagcccttgcgggtcttaaggtcactgtgaagctgaggcaggactcaaacttccaatcctcctatcctacgtatgattttggattaaactcccagctctacatatgcagccttaaaaattaatacagcattttaattctttattttgatctcagtcttcctccacttctccctaagatcctcccagatccacccctccccacaattccaatcaactttatgtccccctttaaaaaaacaataagtcactgaaaccaatttgtgctgcccctgagcgcggggccgtccatcggagtgggactcacccaccagggatcacaagctgggctttcttttacaggctttcccctctgcgagggcttagctttgccagcacaggtgggattttatctttgtagtgaagacaagggtggaaaagagaggaactgttacagagcagtggcacttcagatctgagcatctccgatttaggaaagaattgtgataatgccactcagtattccacctccttctgggacgaggaagatcaggaggttgggaggcttgacttgacgttgatgtgttagacactgaatagtgctgcactggaggaaaactctctggcagaagaccccgggagtagctatttttgcaggtgttagggaaaaaaaccctgtgcactcagtgattccagatttgggaaaagattgtcaccagagaaaatgccattttatttaactttcatttattttttattttatatggaaggaacccagaagtgccggaaacacatacgtgattattttgatcaagtgttcacgtcggtcatcacggcagaattgattggactttatagactcatttgtcaaaaagcttgcaaatatgacacactagtaattacagcaaaggcaattacattcactgttttattaataagaaagaaaataaatggtacctactaagtgaaattagggtttctcccaatttaaatatatacccactagcttgataagagtaggggaattggacacacgcctgtcacgattggatgaggaaatgtagaacctcaggatgctaggggaagcggagtgaatgagtccacaatgaaacagaaagagacattgtggatttaaagaaggaaaatgtgggttttcaagacccctgaaaagccagaagaaggagaaacattagtatgctttcccagggttggaaaggagccttgggtttggccaagatccaaattacatatctatgtttcaccagatgacaactgaggtcaagtctggtgtcatctagtagcctgatccagaccttctgtgaagccctggcagcctttgagatgtccctcggcatccgagaaagcactaaatatcccaggcttcaggagtctgctactaaataaggctcacattaaaactgccagttaatgtggaagaaccatgcaagagttcgtttagaaactcctactcacttgcaactgtattgtctctcttccttgccatttaggacaaaccatgagaaaacttacagaatttattagaggttaaccaattaattctttgaagtgtcatagctaatgtacattgtaccacagagtatttgaaaaactgaattaaataaaaaaaaaccagcctttcagaaatgaaaaaaatacagtttctcattttagatgtcttaaaaagccgtatgattctccctacccccaaaattaactgtagtatctccttgctgtgattgatgggaataagtggccagacccactcacaagcctgacatcaggctgctaatagatggagattgaataggatgttcttatcgacaaaagacttgatgtggcaaatgaaagcatacacaaataagaattcataacagaataattacgttaatcaatacataatgtccaccttcgctcacagggaacacagagccaagaggtcatttttggcagtattatcaaatgggcaacatctttactcatgctagagaattctgtcccattaggacacaaatgggttttcccgatgaatggataatgttagggagtgaagactcccaggagtaagacaccttgaaaacagcttcccagacacaatgagggctttttatatacaatttgctgtttggagtacttagcatgccatctgcaccgcattttggtttttatgacattgagactgtcattagcgtttctcgggatggaaatagcatgcaaagggcttcttttgaggctgttcacccagcagctccagattcagccccagaatttaaactcaagggccatgcttcccaccactgactgtgccatccccaggaaaggcaatgccagcaagcatgatgggtaggcagttgggatgacggacttgcttatggagatcaccgtctttacactgtttctaatcattactattctaactgtgcaatgagagtcattggaatctaagccagcgagacagctcagtagttaaagaggttaccagggaggcctggcaaccagaatccacatgaaagtgaaagcagagaactaactccgtgacatcatcctctgacctccacacatgtgccatcccaggctcacgctcctctgacattgtgcccacatataggatattaataaattaatttccaaaggacaccatgaaggcgtcttgcttttcttccaagcgcaagactctttgaacgtttcatctctttgttttatcgtcattttcttatcacgggattggaagaagccggtttttcttcattgtgtcgataagactattgaggtgatgtcaagagacactggtggtggttgtctgctagagtacggagtggattatcaagattctttgagtgacagtcacagtaccactgtttggtgctcagcttctctgtcggtttcattttactccaatttgccggccccatccttatcctctcttgtctttcttgcaaaagcttcaagctagacaactgcttgtcccccaggcctcaggcaaagatcagttttggtttaacatactaattcagctgacatgtgattattaaacatgtgtgccatgccaaaatgaaaaagaaattttacatcaaatgtttttaataaagctttgaaatgccccaactctcaagaagctgtagtttagttgggccaataaatttacacacaggtgtaagcaaaggactcggagacaattcttaaaagaggtctggaagcatggagaaattctgaataggaaccaggactcggagtgggaaatctgggtcattggaagggggcttttaaatggagttttgtgagaaaataagttgtgtgtgggtaaatctagtatgtaattttttttgctaacttttctcctgaaagtgggtgtctcattgttgaggtcagctgtttctgtgggtttcaccagcctggtctggacccttttgcccaccactcattcttctctgcaactggattccagttcagttcagtgaatagttgtgggtgtctgcttctacttccaccagctgctggatgaaggctataggatagcatgtaagtcagtcatcaatcttattatcaggggagggcatttaaggtagcctctcctcagttgcttagattgttagctgctgtcatcgttgagatctccagatatttccctagtgcctgatttctttgtaaacctaaaatgtctccttctattatggtatctcctttcttgttttcttctattcttcccccgactcaacctttctgctccctcatgtccttctcacccctcctcttctccccttctcattctcctagctccctccctccacctcccttgttcgcaatttgctcaggagatcttatccctttccccttctccaggggaccatgtatgtctctcttagggtcctccttgtttcctagcttttctggcggtgtgaattgtagactgttaatcctttgctctatgtgtaaaatccatatatgactgagtgcataccatgtttgtctttttgtgactgggttacctcgctcagaatggtttcttctagttccatgcatttgcctgtgaatttcaagattccattgtttcttttttttttttctccttctgctgagtagtactccattgtgtaaatataccacattttctctatccagtcttcagttgaggggcatccaggttgcttccacattctggctattacaaataatgctgctatgaacttagttgaacagatgtccttgttgtatgaatgtgcttcttttggagagatctacaaggatgacaccaactaaccatctaagcaacagtggagaggctaccttaaatgcccttccctgataatgagattgttgactaacttatatgccatcctagagccttcatctagcagctgatggaagtagaagcagacacccacagctaaacaccaaactgaactggaatccagtttcagagaaggagaagtgatgagcaaaggggtcaagaccaagcttgtgaaacccacagaaacagctgatctgaataactgagtcttggcccccagactgatcactgggaaaccagcatggacctgatccagaccccctgaatgtgggtgtcagtgaggaggcctgggaaatctatggggcctcttgtattagatcagtacttatccatagcataggaatggactttgggagcccatttctcatagagggatactccctcagcctagacacccgggagagggcctaggccctatcccaaaggataggacagactctgaagacccccatggaaggcctcaccctccctagaagcagaaatggtatgggataggtagggtgttagtcgggggcagggaaggaggggcgggagagggaactgggattgacatgtaaaacaatcttgtttctaatttaagtaaaaaatggaggaaaaaaaagaaaaaaaatggcaggaaaacaccgggagtggcttgaagcagtagtgatcattcaggaagcccactgaggagaactgattgacccttcaaaaacacacctgcagtagagttccccttaagagcattaaaacaaaaacaaaacaccagataatctctgccttcaaatttgtgtagcaagaagccattctttcctttggtctttggaggttgttctcaaccctgcacaacttggcaacctaatttagttaggaaacttctggcagagagttagacaaatgtcctccaaaggaccatgtgttaagggtttggttgtctgtctatggctctcttgggagatggtgggattttaaatggtggggtcttgtgggatgaaattgggtcataggggccatggcctccatggggatggacattgagaccacagaccctttctccttaccgccctgccttggctagacacaagctagagttactggaggggagggaacctcaactgagaaaacatctcaataagatcagactataggaaagcctatagggtattaattttattattgatgggggagaaaccagccccattgtgacaggtggtcctgggatctataagaaagcaggctgaacaagccatggggaacaatccagtaagcagctccctccatggactctacatcagctcctgcctccaggttcctgccttatttgggttcctgtcctggcttccttcagtgatgaaagtgtaagccaaataaaccctttcctccccaatttactttttggtcatggtgtttcaccatagcaatagaaaccctaattaggatacccccttgctttatggctactttgacacccttgtgattgtacagggtctacagttgctttgctccctgcacttgggcagaacatcacggcagggtggcaggcccagctgttcacttcttgatagagctgaagtaaatgaagcatggttataaagagccaagggtaggaagccaccccaaggacctacctctgatgaactacttcatttaataaggatcccctttttggagtttctgcaacctccccagatagattagctgctaggttactagcagtcaaaacatgagcctatggggacacctcataccttaaccacaacatcaacaattttgtcccagtcatagaaggctgactgactttccctagctgctactcatcactctgattgcttagctcagtcaatgtcattaacccaggtgggaatgaaggtctgtcttttccaatctcattgtattcttgacatttattgtttgattttcaacattggctgctctgatctttagagtgaaaagccacttcaaaatcatttctaaatatagtcaggtatgtgctaattgatttttctctctctattgaatttttcacagcaagaagagatgcggctggagtcagtttattaactaattagaactatttggcttgggagcttcttaactaagaacaagaagggggacctagtgtggaaggcagaagcaccacctggccctgaggggtagtgctcacccagctgaccacagatttttttcctctatgaagcttgtggctcagaaattgaatgagaatcaaaattgtcccccaaaatgcttcagagtaggaagatatatatagttggtattcagtgttggagttccaatgatatttcagtaatattggtatattacaactgtgtgttatttcctacttcagaaccccatgttttaaataggacatctcagaaacatttaagccaagaaaagaaacggttgacttgtatcgctatgatttgctggtaggttctggccagaggcatggcagagatgcaagtagggtttctatgtcactctgtcttttaaccttccttccctctttatatagccaaggtatagtttctggctgtttttcccaagtgtcaaaaaatatgattttacactcgggaggcagaggcaggtggatctctgtgagttcgaggccagcctggtctccagagggagtgccaggataggttccaaagctacacaaagaaaccgtgtctcaaacatcccccctccctgtttctttagaaacagaaaacttaaatcctcctggctgggcagttaaagagctatctggtttgataagtaccatttgttgaagatactgtcttcttgccagtgggtattgttggcctatttgtcaaaaatcaggtgggcttataaataggttcccaattctggtccattgatcaatgcctctgtttttatgccagtacaatgagttttcattattatagctctgtagaatgatttgaaatctaagatggtgatatttaagcagtgttttatctatcctggtcttttgtgtttccatatgaaacttaaggttagtttcccagtttctgtgcagaattccattggagttttggtggggatttctttgaacgtgtctgttgatttttctaaggtggccatttacaccaatattaaccctaatgatacatgagcctgggaggtctttacatcttctggtgtgctcttcaatttcttttcctggcctcttaaggtttccattgtgcaagtctttcacttcattggataaatttatttgatggttttattttatttttgaggttatcttaaatggtattgctttcctgatttctttctttatatatttgttggttttgtgtataggaaggctactgagttttgtatgttaattatgtgtcctgctattttgctaagtgtattatcaactgcaggagttttctggtggaggactgagggtcttttatgtatagaatcatatcatctgggcttcttcctttcctacttgtgtcccctctacctccttcatctgtcttactgagttggtcaaggggtggggaatagctcactggtggagagtatactttgcatgtgcgagcacccgagttcaatctccagcactgatagtaagtaaaataagttgggcaatactgtttaactgtgattctatatagcaatgactcagtttgtttgtaattgatggacacatgtttttaaaggagaagaataaaaaaaaaaactacgaaaaaatcctatggggattgtctagtcacagcaccttttttgttttttcatcgtggcactcagtagagaattagctccattctctgcaccatgctgccaagtcctttggtaagttctcctccgtctcctattgaattgagcagggcacaggctcatgagtttgggagaggagtggcagttgctttgttgtggccatccgtcaccacttgttcacactctgcaaaacagtgctgagaaatacagaggcattgggtgtatgctccagggatagaaacattttcactgtacatagatttttaaatatcatttgaacgttttcttcttcagaaaggaaaatccccatccttataattttgatgttgataatcataatgacagcagaatggtagcaattattccacttactatggtttggactgtgcatgtaatctgtcagcaagcaacagacatgttcttgacagattcgtggaaataaaaaaaacttagtttgtatttatttgtctctgtttttagcagatgttatttttaggctcaacagaataattatgtttacttataatgaaagacattattgatgtgatttcttttttcctttttattgcatatctgtacactgtgtagttttatcatttattcctctaattctcccctaattcctctaagattctttcagccttcctctcactgcaatattctcctttttatgtaataagttattgagtgtaatttgtgttgagaataaacacactcaaggttgtgtagaaattcacatagaaaaggtaccctacaaggctcatattctttttttattcttaatcactactcatatttacatatccatcccccattcccttgctctccatttctcccatgctccccaccaactctcccaacccaccccaactcctccccagagatagtgaggccctctatgggggaccttcaaagtctgtcatatcatttgggggagggcctaggccctccttgctgtatctgggctgcaataatacccctccatagggaatgggctcccaaagtccatttgtgctctagggttaaagactggctccacctttagaggtcccttagactgtcttggcctcctagctggcacccacattcagagggcttggtctggtccagtgctggttccccagttttatgactagggtcttcatgctatctagtccgacaaattgcatcatctttctttaggagccgtactgtcttattattaccttatcaataattaaagtttaactatgcatttgcaaagcacacggtaatgtggtgatgattctgaagaaacaaccaagaaggaactgtcaatgaaaatgaaaaatcacatggggcgaagggatggaaatgcagaggtctgagcctgaggagcctgaacccagtgctcaagaattctgcacagctacagagcaccttgaggcatgggcttggttattccataatgggagagagaaggggtgcggaaggaaggttatgtaggggtgagactcaccatcctagcgtggatgagttattgatgatgttacaccctaggttttagtgtttctccagatttaacgttgtaaaagttagtgaagcaaagacacctatgaattcattgttgagtctgttctataggagggagtgtaagcattggagatgcaactatgggggatgggatgagggtgtattgttggcctggaacaacctatagacttacaggaactgtaccatccctgtgaatgggatggaagcctccagttggatgatcattttaaaattactagccctcacctgtttgaatctagaaggaatttatctgttgtcaggactcactgggttttgggatgttgaagggcagcattttcttttgctctgccaggaccatggggacattcttcgtgcctacccgccaaagttctgaaagttgtgaagaggcgctcacccgggtgtggggggggctgcatcacttgagtgaggggacatgttcagtggtgtaaggggtctgtgtaatgttaatgctggttttcaacttgacaggatctagcatcaccaaggtaacagagtctctgggcatgcttgtgaggagttttctagagtaggttaattgagtcccttcctaactttgggcagtgccattccataggtaggagtcccagaccatcagaagaggaaagccagctgtacaccactgcccattgcttcctgccccctggctgcagacgcaatgtgaccagcctctctaagctccggcagccacaggcgactgcactcctggttggtgagagtaataaacccttcccttcccgaagttgcttttgtctggtattttataacagtcaagtaaggatgcagtctgctctgcctgtccctgaatgccgtgggctgaggagcggagagaacagtagagaggggaagtacgggacagcaagggagaggccaccagagactcatgcatgggctgcagagggaggtgcatttagcaaatgcatggtgccatggtttctaaggatgcaccgcccccagattcctgtgttggaatctaagatggtggtcagagatgtagccttttgggggtaattaagtcctgaggggttctaccctcagaagtagaatctcccccccacctggtgtggtgatgcatggctgcaatcccagccctcagggttggggggtgggaggaggcgcctaaagacttcagagccagcctaagctccacagcaagtttgacaccagcctcagctacctgagaccccatcaaagaacaagcaaagaagctaaaggaagtgggaagagagtcaagggaaaccagatggacccctttgcccttgacaccacagcaatgctctttttggggcatccatccacactcctggcctaaggagatgtcttttggaaagttgttcatctcatgtttctccgactgtgatgcttgtggggacgctgcttgtctgagaccctctgagtgcactgatgtccactgtgggccttcttaatccccaattacccgctgaatctaatttgtgtcctgatagcaaagtgtcctgtgtagaaaaagtgagtctgctctctcctgggcctttcccactgacaagcctccttctctggctctggtgcccaaactcttacttgtaacagcagcctactcttcattgtccacttgagagctttgtctctctcttggtctgggttctttcctcatctctctctgagccagttcatgaggaaggtcattgtgtgtgtgttctcacaaatccctcactgctcagtgtgtactgactgagggtctcttgaccattggagtgagccctggtcttggctcagtcttcccgatttgtaacactgtctgtatgtcagccattcctttgtaaagagggattcggggatcatcaattcactggagttctttcttacatatttacctatctgttgagacagagtagtttctttatgtagcccaggctagttttgaatgcactgtatagcccaggttgacccagagtatagcaattctaatcagtcttattaaataaaagcccagaatcagatattagggggtgaaagctgagagagcagagaagcagagcaaccagccacaagagagaccacttaccgctactgaatcctcagaccacaggggcgatcctgtctctaccaattctcagactgaatacaatgagctcctgtctcctcccaccttatattcctctttcatccagccatatcactcctgtctctacctccctagtgctgggatttaaggagtgtgatcccaagtgctgggatcaaaggtgtgagttctgtttctcttttagactgattcaatcttgtgtagcccagagtagccttgaattcatagagacctgtctgcctctgtctcccaagtgctgggattaaaggtgtgtgccaccactacctggcttctgcccgtttttacattacatttataattatgtcgttgctggtgtgggtgctgcttagcccattcaggctgcagccataaaatactttagactaagcagtttgcagaaaatataaatttatttctcacagttctagagacagagatatccaagatacaggttctgggtgacttggtattggctgaggctacttctcacagacagccatcttctctctctagcctcacacagagatgagatgggttgggggttgcccttcttttagcctcttgaataaagagcccctttcttagttttatgtcagcttaacacaggctagactcattagggaagagggaatctcagtcaagaaatgcctcatccagattggcctctgagcaagcatgtggtgccttttcttaattgatgattgataccgagggcaagggcccagttccgggagtcttgagttgtataggaaaacaggctgagcaaaccatgaagagtgagccagtaggcagcactctgccatggcttctgccccagttcctgcctcaaagttcctgtcctggcttccttcagtgatagacttatgagctataaggtgaaatacaccctttctccccaagttgcttttggtcatagtgatttatcacagcaatagaaaccctgacagacagggtttctattcccattcctaagggttgcagtttggtaacttaatcctctcccaaagaccccaccatccagtagcactgctttgggggtaaaattattaatatatgagattttagtttgcataaacattgagaccagactggtggattggcagaattatgagctacacagaataccagctatgagtacaaatgttcatgccatgaagctgggaattactgtcttaggtagcagtgcatgtttgaagttgattcagaactatgtaagttgatgggagagacagtggctaattgaaaatgctgagcatcaattaggagaagacaaaaatctttggttgtaagagtttccgggccagcttggaacccaggggattgagaacatagggactgtgtgcagatggaagcatccagtctttggttcatgtacaggctctgcctgatggaaccacagggcatctggtggctcccagaagaatgagttggtcttttggggaaacccatccatcatggagctgccccatgctctgagctgctcagaattctgggaggagaagacccccacccacttgctgtctgtcccagaggatttgctctgtgggaacctgccttgctcctttggggactcttgagccttttgtaattctggtaattagagatggaaggaggatggtgaagcctctgactttttgttctctgattccttaaatagcctagggagcaaaaatctctctcttggaggagagaagagaatgttaattacagtttaaaaatgcaaacccaatttgctttgcttcctgcaacattgcttcaatgctgcagcttcgggtctcagaggtggcccatggccttctcttaaggacctccctacttgtaacttggcccctaatatatcaatttagttgtcatatttgatacattaattcacccaactggaaaacagaaacctttattaagaaactgttcattgccaacaataaagagttaaaacatgatattctttttctcttttatggtgctagggattgaacccagggccttgtgcctcctatccaaacacccaaccactgagctactttctccccaagtttctctgattgtaagagattaagtttacagataaattaggacgtagcatcagaggacacagaggctgcaacaaaacttgcattagacgaatctgaggcagagggaaggagggttgggtgtcagagctgacatgagtttggtttggtctccttagcaaaacaatagtcattccattgtgtctactgatcttgagcttagggctttaattaaccagatttttccagtttattagaatctcaagccaacaccagggaatatcacagtagggctgaaaggcaattttctctgcttggaactgataaccctggctgaaaatctctgaggaagcagagctgtgctgtgctgtgggctgtgtggctctacccactgacaatgaggcggctccacccactgaggatgaggaagccttgatgttttctggaaacaggaggaaaagcctctcaagccacctgcattttaagattttgggattcaacatgttttttaaacttgacatgcggtctcatgtttgttcttgcagagcctgggcctctgagagctgtctggatacaggtaccatggctttactgcagtggtgttaggagtattggtgagctctatacaggccctgtgaggttcctggctatagagaggaaatcaagccctgagaatggaaaatgagtgatattttctagcatctaatgcattccccattgccacattccttgagcttgtcagggcttttatcacagaaaaagcaagattgacacagataggtggcttttggtgacctccccactaaaaggttttatgtgtgagcaaagccagggctggagagacagcgcagctgcaaacacaagaccttggattgctctccagaactcaggcaaaaagtcagatgtggtgacatgtgactgtcacctaagtgctagagagtcagaaatagctgatccccaagggatgctggccacctgatctagtctactggacaagtttctggctactgagagacccttcctctaaacgcaaggtggctggcttctgagcaatggcagtcaaggtctctgcctgtcacatgtagattcacccgtgggcacatatattcccccaacatgcacacttgtacacacacatacacacacacacacacacacactctctctctctctctctctctctctctcaaattaatcttgaaatgtttttataatttgaaatgtttatgttacagttaaatctcctggaagatatcctggtggctggtttaaagaagtctttggctaagagatggttttactgtcattaaaaccttctcccatgtcaccctcctgtactctgtatggcatgggatttgtctttgcttgctgagtgatgaattcaaatgctaaggctatcagttggtttgtatatagagagaaggagcgcccagactaaagtgcatgggattccccttggtttacatggtatagcttgaaagttgtacaaagagttgtccaggatctttgaaaactccgataatttttagcatttatgtttcttgcgcttaatgtcaatataggggcataattaatgaaatgttttatttcctcagtttgtactcctgtctcgagttatataggctgctacacccaacatgtggaactgtgtaaacttcctagcagtaccctgtgctctttgaatgagggactggcagggactggggtgagcatggtgtagttttgattttggctgacatataatatttgtgcatttatggagcacatagaagataaaaaagcttggcaagtgagactacaccatagctaatagcttctgcagtgaaagacaaaggatcttcaggctccaggcgctcatacagtgggacgccattcacaaactccctctgaagagagttagtgttcagaatatacaaggactcaataacacacatgcacacacacacacacacacacacacacacacacacacacacacacacacacacagagagagagagagagagagagagagagagagagagagagagagagagagcttgaagtttcattgtactcgccagggagtagagtctgtagagcctgtgggagctctgatgaggattcttggagctgtagacacagcgttagcctttctcatggtccttccccaagcttcaatcctctgggccgatgccatgggacatggctaacttctgcatactgaataccttgcactgaagaaagggaccctgacccgactcacaggcggcttaagagttttacactggggagtgacatatttgttgtttgttgcactggaagcaataatttctttttcttaacatttcacagtatcatacaaagaagtgggttttgtgatgccattctcctacacaggtgttattctacccttacccacaccctcttctactgccttccttatatcccccctcctactggtctccttcatcctcccaaagaatcctcccctctgctcatattgtaaggatcccattttcctcccccacacctttaatattccttcctcacctcctgtgccccccccacctacaaatatagatgactcctatctgccacaactccttagtattcaaatgtctagtctagacccagggcactgaggcagcttgccaagcatgcagacatcaggaggccagtggagaattacgatgggccaacatcccagccctgtccaccagggctgataggctcaaaccatcgtcaccttcatagccttgcttagccacactcactgaaccagctatgctctgtctagttaccttctttgtcaggcctgagtcaggtcatggtccaattcttcagtcttgtcatagtgcagactctgactgtccatcatccatgacctgaaaccttaccatggtgtaagataacatgttattttggcagtttcctaactcttggctgaggatgggattgtgggtcagagacaagaaactagactgtccacaaggcagcagatggctggggatggggtgtgtgtagggatggaaggagggagggcaagctcattagcccctctgaccctaaagtctcattggacagtatggaacaatccaggtcaatcttgcatggtattctcgtaccacagagaaaggaactgaaaaatgtctattattgatttcttggtgtgggttcacaaccatgtgtttgtgtgtgtgtcatgcctcagggtactgcccagcccaccttgttttctgacacatgacctctcactggtctagagcaccttgatttggccaggctggctggctagtgagccccaccagtctctatctccacacctctagaagtacatttatgtaccaccatgtctgacctaaaaggtaaaacgggtttagggaatcaagctcagggttctaagaacaccactgactgagccatcttcccatcatcaagaaacttctgtctttaaagattgtttgccagcactcctgcccagcctttgccctggaggaaggtaatctttttgtggtatggtttaggaaataaatttttcttctttttcagagggaggcatgccctgtgctctaaagctgcttatgacatggccattcttgcaaaaaagcgtagaacaaaaaccaagttctgttaggtggttatgatgtttagatttttgctactttagtagttgtgtaatttctatagtgtggttatggcttaacactgtccttcaaaggctcgagtgtaggacctggggtcctgttacagtgtggacagaaaggcccttcaataggcttacgttgtcagctgacaggccttgagggaatggttggatagtgaaggctctgacctcctcagtggaggctaattcctcaagagagtctaacgggatgacatttggggatgtgggggctttctcagggccccttgggaattgacacctgccctttctagctctctttgtttcttagatatcatgaggtgagcagccctttaaagttctgaattatgttaacactatttctttataaaatgcaattatttgcttattctgaaataattcaaggcaagctgtagatcagctattttatgtgacgaaagagaagtgctgggcttgtttacatcacagttcatatattcttcttgttcttggcattgctgcatggttaaaacatgagccaagaccttttgttccaaatcctcattagggatcagagagagggagaagaatatttttaaattttaattttttaaaagcagtagtggaatgatcaagataaagagaaggaaggtccagagtataataaatcttgttaataaaataccaataatggactcgattagaaactccaggataatttattagaattcaaaagaaaaatcccaggacaggctataaaatcccagattcccaaaggaggagaatgaagaagagaagctgatctagaggtcagttccatggcataggcattgtggggagggcagccttagaatgagctagaaggcccatgaatgaactagaggggctaaaggcttccagcgtcagaaggagaaggacagtagagaagaaaaagggaataattatgccttgctgagttctgaaagggggggctgaaccactggaacttcatggtggttcgtaaggactgtactagggaattctgggaaggtaacatacattgtcttaaactgaccctccttcctaggggtggtcctgaaccagcccttcgaccctgcccatctggattgacccataagggaggagacaggacacacctgaaagtagactccatcttttatcttgactcttccacatgcaaacaggaacaagtcactcctccgtttaccagtgtagtgattgagagacacctcaggtacccagaagagtaagtggtaatttcagtcttggaaagcaattcaccgtggggagctgctggcatcttgggagacctgcctttctttgagaagtcatcaggctttggaagctgagcaccttgaagagggaatttgtttctgcttttgctgtgtgaacacaactgttcatcttgcctattattcagtgctggctggaaacctttgcttgataagggccggttccttgctcctcctgccagatgggggcatgggtgggagtaggggtggagaggagaaggaatgagtgtgtgtgtgtgtgtgtgtgtgtgtgtgtgtgtatgcattgcctcctggtattctgagacagatttgtcagagcactgccccaacatacctttaattcatactcttgccagccatatttttgtgctggctgctttcactgtcttgataatatcttgtcagaactgcctgttaggaactgaagctctatctcctgcctagaactctaataaatgccgaagtaggtacaggacagcaggaggtgccttgatgaacacaatgtgggacaaaccttcaggtacctagttagtaccttgtgggagggggctacaaaatggtgcttgccagttgcagagtcctcaacttgccttgtggatgtgtcctggttcaagccccttctttggcttgtgggcaagagggcttaagtgcctgtgtgagcactcctggagggttcatcaattgcctttctgtggctctgataaaataccacaaccaaaagcagcttaaagaagaaggggtttattttagcttgtggttgcagaggggtagcctctgatatggtcggggaaagaatgacaccgtggcaggaggaagcaattgttggctggtcatgttatcttgcacagtcaggaagcagaaggagagactggaagtgaggtcagactgtaaccctcaaagcccacccccagtggagcacttctccagcaatcctcttaaagggtccacaacccacacaaactgtagaccaagtgttcaaacacatgagctgacagaagatgtttctcatttaaaccaccacggatatccaggacatactgttctggttcagacaactgtaggcacctagcaatcagggcacagctccttctgggaagaggtgctttcttagggatcttctgctaactgcctgcctgctcttcttctccaggacagctgtcatttcttcttgtcccaagtctcccttgatcagcagccctgcttccctgcaggatgtgaagtttaattgcacattggaaatttaacgaaatctgagactgattcttgcatagctgtgtgtgagcccccccccccgtctcctcctcaggttgcactgacaaccttgtgttagttatctttctcattgctgtgactgtatacacaacaagaagcaactcgagggaggaaggcttgattttggcttgaggtttgaggggctacaggttgtcatggcagagaaagccttgtattgggcgtctccatgatagcaggaacacacagctggggttccttagttggaagaacaggaagcagaaagaagatgggggtgagatgagccacaaaacctcatggtctaccctatagtgatctcattcctacagctttaggcccaaattcttgaagattctatagctcccggaaacagcaccaccagatgggaactgagtgttcagacctttgagcccggcgttttgtattccaatgatgacacccccacagagatcccagtgtaactagcaccatgcaggctttgcaattcagcaaccatagatctgagttctcacccattgctcataagcgctgtaagcttgtagttgctgagcctcagactaaccgtcttacaaacggagatgctttctgctctttgggattgtttcaaagcgtgtatggactggtgattcaaaattcctgggcatgccatgggtgcttgggaatgtgatctttcttctagccatgttgagaaacaattccacacagtcatccttaggaactatttttgccatctattttctgaatgcatcctgcctgaggaaatggtgtgcagtgatacactgaaaaattcagcaggactgtccattgagacactaatgagacctgctaattagacttttttctttatcctaggcttttgcagaacaagataagggaagagattaggagatgactgtcatgtcaaagaaaggagagaggagttcacagccagctcgtgtatggagtttagattgaaatgacaaattcatgaatgttcctgcatctccagcgagtactttcctattgattctgctctcatcttgactataattattaaatgcttatctccatctttatcccatgtaccgctatcccagaagatcctgactttgacaatcaaaagattccaaataaaagataaggaagagagagataattgctaacaacaaaagtatctgcatgacctgatacattggtatatcatcatttccgactcagtagatatccaatttgttcataaactatgattttaagtcttaccttgtaagctagggttgggatgagtctatgatggtatgtaccaggttggcaagtttactggtaagagtccagttttcttaaggtttagtgtgtttagtagcaattgtatcactggtatgttttgttctatgtggattcgaatcataggtaggtgatcagtgctggcaattgtgggcccttgagtacccaaggtccaagggctagactggtagacccagaggtgtacagcttcaagcctggtgagctagagatctgtggctcaagattttagaggtcacagacacatggccctaggcatttgagttggagatgttttactacagactttaaacactagtagccctgtatttggccaccattattacctcaacttcaacagttgttcttggaggcagcagccacaggaggagagggagaaggaggtggccacattttgttttgttataagccttgagtgctgagaccctcagcctgacagcaaaagttacatgatagtctaacacatatgcagctgtgttctttagcattaatgcatgatgccaggtgtactaatgagtgcctgtgtcagtagacctcatgctaactatgctatggtgtgtgtgtgtgtgtgtgtgtgtgtgtgtgtgtgtgtgtgtgtaggtacacaaacacttgtgtgagtagggagggccagaggttcacgtcgggtgtctttctgtatcactctccacctaatgttttgagacaaggtctctccttgaacctggagctcacttattcagcttggctgatgaccatcaagccccagggatcctcctgtctccatctcccccgggctgggatgacaggcatttgtacctccttgctcagtttctcacatgggtgctggtgatgtaaactcaggtcactatgcttgtgcaacaagtacttcctgactgagccatctcaccagcccattgacatttatttttagcatgaattccatttaaaaatataagaaacaggtttaatgtaagtggtatgcaattttaccctgacagcaacccataaaatcaacaaaaacaaacacaccaactgattgatgtataccaagtaggcttttataaatccatgctgtatttgcccaatgacagaatccctttacagctcatttctttgtgcataaccctgctgcaggtggcttactgctgggcatttttggtgcagcgagccaaattttgccaagcatattcttctagcctttctcataaagatagtttcactattacccctcagatgctattaaacctgtttgcccccagtgtcttgggagtgactggagacaaagaacatggctgaggaagcgtgcctgacttgacacagccttaaagccacctatgacttgttcatgtctttgttccaaggatccagggcctggaagttctaggttcactgtgccctgcacttgggtagggctcattggctaagtttaattgataattgttacgataaatctttctgccaaaagcctcctgagccccaccgccacgtgtgagctttacgccagctgcccgcctgagttagggcccaaatgaatacacagaaacttgcattaggttcaaaacttcttggccaatgactaggacttctcatctgctagctcagtcttaattatcataaatctatatatgttataagacttatcttatcggacgccttattggcgtccctccttgccagtgactcacatcctgccgctggaggaggcgaacgggaaaaggagagaacacttcctgtttccttgctaaatataagtctccttgctatgtcacttcctgcctggatcaccacttctctactacatttcccagaatcctctttgactcctagtcctatctaacttgctgtctcattggccaaatagtattttatttaacaatcaataagataaacatacacagaagtacttcccccatcagaccatttctcttttgagctcttgagtaccaagttaattttattttcattataatttcacctcaattcagacagtgaataaccagaaggagagtctttggccagaagccaaacagaagagtcaccatcctgaaaggcagaaagttgaacctggcaagcaaacagcaagcaaaacggaatcctagaacttagttagacaatagtaatgggttgttttggaaatgaggaactgtttctgtggaaattttaacaagtcttttttgctgttgtttttaaagaaggtcttaggaagcccaggatagtccttgaattttctatgtagctgaggctgcccttgaactccgggtcctcctgcctctacctcctaagtgctgggataacagacatatactatcacactttgctaacaatggggagttttacataccccaaataatttggagagaccttagatgtgagcgatgagcatagtgagggagctggaagagcagcttctgaggaaagacgaaacgttttactgtgagtaaaaatggcaaatagagaacacagacccttgattaataactatgcatgagcagtaagggaagaaaacccatttagggtgtggaagcatgaataatggaaccaattaagtataggaaaataggcagagtatgaaatgtgaaatgtctatttctgggttttccagatgggcctcttgaggttctttcagtgttaaatattttccagtaagatgggtaaactcttaacaatctctgacttaaaagcaaccaagaggagcaaagggttcaaagggtttttcgggtgcactttggggctagggtgcagcttagagtgagtgtgcagtgtacaggggaccagggatcaatttgtgtatgcgtgtgcatgtacatacatgcacacatgttcacacacttacaacatggacacatactgaacacatgtacacacctgcactcatacatggacatacacacacagacacacacacacacacacacacacccttggcctgattactctagggatccaatcccaagacgaggcctgcagtggggcagaagagaattcaggattccagacaaggtggcatagtggtataaagagcacatagtaggacctcaggcatccgagtaccaccggtgaacctgtgactcagggtgacacttagtgctgactttaggcaaatctctggcctctcttggcgtctgttgattgcaaagatggtgccgggagagtgcagaggatcaccagctctatacccaggtctcgccagtcttggcaatgattctgctgctgcaattggctcctgtcatggggcttcacatcgtcctctacaggtggaggcccctgaaggcctagtagagcaagatccgagagggaagggtcagtcctcaggggagcagggccatcctgttagaattaacctcccatggctcagactcacaccacggtcatctgatgtacttagcatttggtatgttcacaggcactcttgtttctcttttctctcccgagtcttgattttctagttttattcatgttatctgtcactaaggtttctaaactgaaatgtgtattttgcctttttgtagttcctggtctcactatcccaaatcctcttggcaggacatcatgaagtaaataaatggaatatacacagttgtgaagtttataaagcaaaactgtgtatccttttggggtataagcttcgtggagttaaagaatagagaaatgcatactagtgaaagatagcaaacgaaggacactcattttctctgggggaaagcgcgcttttgtgtgtgatggggggttggggggtggaattgggaaagaaaatcctaagggtgtcagcgatgtttgggtggatccagagcaatcagtaaagagtaggtgtgagtaaagggttactctccatggtgctggggacttcattgtagagctgggtctgccaggttgatgggaggcacgcaggtgaggacacagttggctcctgcatgtgtcgctggagggttgggtttccacgcttcctcagcttgtaccttctgatcctgttaatgttcccagctagcatcagtgtctcctgccctcgttattctatctcatgggaactcactgtgcacacagggttctattcacagctttgacatctcaagttctcaacgccaaatgtttcgcaagcgacgtctaatccatcacctctctgatttcatcatcttctaccaccagaacccgacgggatcctatgctcagaatcagagcaccatcaactagattaaaagtttaccctgtccaggaggattatcccggcaattatcccgacagatgggatagggcttggctgagctgtccaactgaagttaaaaggaaagatgtcgtggctctggctggcaaagggttaggaaagagatcagaatcttttcattaaccttattatttaaaaaatattacagggctggcctcagctccaggcctgccatatgctttctcctgtcctcaacccttataaagtttctgtataaatgtatggttacttactcatgtaggccaatactcgagttttttcactatgttagtaaaaaatgatttctgtctcaaccccattgttttcagtgcaaacactggagtttaggcatcactgcccgccaggatgggggatgttcagtcatgtgttagcttgttgtcagtcatttgggatcaagtttcttctgttgctctctttccctgctgccatcaaagctttgctcgggagaccatgcacatggcggataagcatttatagcatggtgtgggtttgtcttgatggcctgctgaggtccatccatttgacccccaggctcgtctctacctaatggcgtctagcatttgaacagcatgtttggctgaacccctgctgaacaggctcttggcggctgcatcagcactcctgctgaaatcccctgcagcctgctggcactgtcttccagctggctgctgtgcccaggatgggggaccccagcatcctttcagtgacttcccatggctcttggctggagaaacttcctgggctcttcccagccccctcacttcccccacaaggtggctgctttccatggcaacaggaactgcgtgctgagcaacacttacctgaaactgatgctgtggacttcacacttcagatctggacacttcaaaggatggaggtgctttgggggcctcatgggggctgaggctgaggaattgtgagtctgagcatagcctcccctgccccttcttaatggagacagcctccccagcccacacttttattttctagacaccaaagaatgaagaaaagaaccaggctgacatcttcttcctaacccttccatcttatcattggacttaaaatttgtatcaccttgtctaggagtcctgtgaatgtccattttaagaggacagtttctggcccacccccacatgtggcatggtgatgacagtaaggacagcagggcatcgtccagcttaagaagtatgtacatccgcccccccccccccccccgggcatccttaggggtaggattctaaggactcacagcatttcccaactttagcagaaatcacttgatttgctgttcgatgtcacttcaagagctctgacagttaaggcacaaaagggaataattatgtaagatataaaattaacaagtaccgtggcagtttgtgaaatacctgggccaaattgatctcagggaatggtgctagcaatttcaaagaaagatttggcaatgacagggttgctggagggttgggttcaggactgccaatcatccctgtgtgttgagtctccactagaatcctggggagcctgttcagatgctcagtttatgctaaacggtctctctggacccccctctcgcgttcactttgaagcagaagccaaatcccatctccagacctcttcccctgacttttgcatccccatcactgtgagttcagttcataccatagtcatctgtggcccagagtatcaacacagccactggctcttgttgccttgcccagtctgtcaattgctcaacctaggtgttaagaatgaaattgatctttactcccccagaaaaattaagtaaataaagaattcctaatttctgaacatggtgtatagggaactctacttttccacattcagcccatggcagcctacacatggatccatttgtttccacagttagaatttatttattaaatgctttaaagaaatgtgtacaagtatgaatggatacggtttttgtcttggtaggtgtgggagcatgagagaggggtttgaaagaaaggaccaagacagagaaaacattgatggacatgctaaatgggatttctgcaaaaatagagttgggggcgtggccaaatctctggaaaagttgggaagcccatctgctactcatgatccatctccagagacgaggctggcctcaaattcacagagatatgtctgcctctgcttcccaagtgctgggattaaaggtgtgcaccacctcttctagattcaaaagctccctttagcccagttactccatggctattgctttacctctgctggacttagaactctctctctctctctctctctctctctctctctctctctctctctctgtgtgtgtgtgtgtgtgtgtgtgtgtgtgtgtgtgtgttgaaagttttattaagggaggaagaggaggtaagaaaatagggtaaagagacagtatagaagagaaagggttgggggggcagaaaggctctgcctgccctccagagaaacggtgcggtaaaaaggaggaggaagtgggcagggtctttcttttaaagattcagggtacatacacctgccatgccacaagtgtaagaggcagggtctggggggagggagggagagagagaggggggattaagaaaacattcagcaagggttaatgatggggaaaccttaaagtttcagacaggagattgtaggtgtgggagccaggaaatacttgctgaggaaagctgcaggcatgatgtggagatgcccaagaaagagaccatgggtgccgagttgctatatcccattcttctctttttgcatgtttatctgagccctgtgtgctggatgtatgtagcttttgttttgttttgttttgtactgggtacacagaaaagaaatcacctggccctcagaggagagtctgtacttttggactgtgttggaatattaaagattatgggggctcctgacgtaggactgaatgcattagttatgtgtttggatgtcaagttagcaaggggagaaaatttgatggtcagtcttgattaccatcttggtgagatttaaaatcaccatggaaacaaatctctggacacgtctatgaggagttttcttggttaggtttactggggaaggataggaagacccatgttgtatgtgggggatatgattgggttgggatcccgggaggaattaaaagcagagtgagatgagcacagcattcgtcattcctttgcttcctgaccgtggatgccctgtagccagctggtttcagcatctgtcacagtgacttctctgccatgatggacactgtcccccaaccatgggccagtaaccctttcttccttaaattccatgtgttttctcagagagacaagtgatgagacggttccttttccccggcactgtgctctgatcctagggtgcccactatttgagaaaaacgttagggctacagcactgttcttatatcctctagaagtgaagggtcactaaaggtcatcttttctacttttgtgacttgagcattatttcattgtgcacatagatcacattttcttctttgtatttttagtggacaggttagttgattctgtaatctggctactatgaataaaacataatgaacatgggactgtaggtatctctgctatacccagttcattaaagtctctctctttctctgtgtgtatgtgtctgtgtgtctgtgtgtctgtgtgtctgtgtgtttgtctctctgtgtgtctctgtgtgtgtctgtctctagctccctgcatgtctctgcatgtgtctctctgtgtatatgtctctctgtgtgtctgtctctccatgtgtgtgtatgtgtgtgtgtatgtgtctctatgtgtatatgtctctctctatatatataggtctctgcatgtgtctctctgtgtatgtgtctttcttatgtgtatgtctctgtgtgtgtgtgtctgtctctccatgtatgtgtatgtgtgtgtgtatgtgtctctgtgtgtatatgcctgtctctgtgtgtgtgtgtccagtagtgaattatccgaataatagcatatctctgcttttaattatttgaagaacctccatactgttttccgtatggccacccccaatttagtttcccactagcaggagctaattgctccccttttccacattctcacagcctgcaggtgataactgcactggagagctcagtgcagccctcaaagtgagtgtgtatagttcagaacgtctcattgaacatgataaatacatttttgttaattaataaaatccaatacacgacaacaaaggagttgccctctctccaggcccgaccagcagctttcttagagtggtgagggctgtagagtgcagagctgggaatctgtttcttggcaacccagggtccaatgggcgcttgttgctttaggggcacctcacagtgtaagggaagacaagtgggcccctgcaggggtcagattgttttcctgtttcatctgttctctctctgctttgttttgtggtgtctaggggactctgtttatgtgggttttggcaggcttgcttgaccctgaattcttcagtgtcatcctctgaggcagcagactctgaagaaggctggctgaagtctttctggggacgccagttaaagtatcggatttttcagaatgaatatactattactggaatatctccagcagaagaaaacagtgacacattcattatcaataatgccatgaactaaaactgcctttcccaatctctaaagtcaccatttaatcttcatgtatttttttaacaagagaatatcttgccaagatttgggatcatcaaaatgaatacatgtctccactttttcaggattaaggtctattcagaagtcagggtgagtgttgagagaatcagaatgtccccaggctccacagcaaaaaagaccacaatagaaatgaacacaaaccatcaagaatgtgtgcccttttgcctgccatgtgtagcttggctttctgctcccaccttagatatctgacagttcatgcagctcgggggtgggggtggggtggggaacctcacttgctaaccaacctttttccttaatgggaggagtctggaacccaccagaccacagcaggacctgtggctacctggagagcccgaggtccctctttcttctagatctttatgggatgcttctcgatagcactgatctgtgtctctgctcactctcttggcctgtgcgaatcagtcattccacattcaggcttctgggattttcctcgcttctcatgtctatggattcttgcctcctagatggatgctgggctggaaagatgttttctctgaactgctggtttctctggtttactgtctgctgtaatgcaaagcattgcatccgccacgtcttgtggagatggaaatgaagctgaatgcttatttgtctctttacaatcaccaggctcctggaacttgagctaaactctgctcaactcatgcagggcaggcataccggtatgccagggaggcgtggggacagcaggcctcagatggcgctcagcactcctcactcacccactaggctggcaagagtatttcttcttttacattttatcttactttcctttttgaagcaggactcaggataacttgggacttattatgtaatcaacgatgactttgactttgaacccctgatccttttgcccctgtctccagagtactggaattataggcatgccttgtgtacccaggttacatggaggtggggaaccaaatgccgggtgttgtacatgatagacaaatattccaccactcaagccacacccgcaccaccagctttgggattaaatttttctttgggattaaatttttctttacaataaattgcttttttattgcaggtccccttttatctcactctctacatgtctattaatcagaaaaaatctatagcaagtactactacatgccaattactgtcctaggccctggggacatagtgaataatgaaatagtctgtttctgtcatcatgtagctgagtggaaaagatgactgactccaaatgtctgaatattcacaggataggccgctgacgttggcttctaacccccacagcagggcagatcagcagcagacagtcgtgcctgttaaatgccaaagaaagacactgtcgcaagcagctgaacctgttcatcgccaacaccagtctgactgcacccagtcctcatgaggtctccttaccataagccaggcatggtggtgcacacctgtgatgcaggggagtcagaggcaggtgagttcaaggccagcctggtctaaatatcaagttctggagcaacgtgggctacatacagagaccctgtctcagaaagaaagaaagaaacaacaaaaaatttccaaggaggtcttgttacaaatagagcctttagggccaggggtcctggttaggagtgtccgagcagggcctgagaacttgcatttctaccaagttccttggtgaagctgatgctggtggtctgcagtgcacacttaaagactgttattaaaatgtttgctgaaagggcggtcagaatccagggagaggctggaaagatggctcagagtccaatttgcagatcccatggcaggaggagagagctgacttccaggagctatccttataacacataacacatccaaacacacgtatgcactcacacacacacacacacacacacacacacacacacacacacacacacacacgcacccagagctaggttaaactagacggcaaatctggctccactgagaggaccaggcacttaatgggaagctgctggggccacaatcacaaagaggaggcttaaccaacaggcaccaagttgttgagccaggatgtcagcatggaaggctctgccagagctttgcattttgggttccaggtcattgcctcttctgttttggcatggtcttctttccaggtgtgtctgttctaatctcttgtaaggacagcagccatgagattagaacctacccatacaacttcattttaatgtaagtacctctgcaaagaccctgccttttccaggcatggtggtgctgcctataatcccagtagtcaggaggccgaggcaggaggatcgaaagttacaggtctgtcttggcgtcctagtttgttttctattgctaggaagaagaccatgtcccaaagaaacttggggaatgtcttagttagggttactattgatgaaacaccatgaccaaaagcaaattgggaagaaaaggattttttttggcctacatttacacatcactgttcataattggaggaagtcaaggcaagaactcaagcagagcaggagccagagagtaggtgctgttgcagagaccatggaggaatgctgcttactggtttgctctcatggcttgctcaacctgctcagagccaccagcccaggggtggccacacctacaatgggctgggccctcccatgtcaatcattaatcaagaaaatgactcagacttttctacaggacagtctgatagaggcatttttttttcaattgaagctccctcttctcagacaatgctagtgtgttaagttgacaaacaaaacaaaacaaaacaaaagaaaaaaactacccagcacactgggctacacaacaagactctgactcataaagaagaaaaagaccatctttccaatctggaggtcttgaagttaggattccaggacatgtatctggagggatctggggtacaattcagtctataacagcttccagagagctaccagaatgagccaggaaggagaagacacatccatgggagcagagagccacatgccaccccagagagaatctgaggatgagggatgatgggaggaagttgtcctggggacttttgaggctggaggaaaggagagcagaggcagatctgagggagacagttctcttaatcattaaagtatggttgctaaacatgtaaaattggatttttgtttgagctcactttaataaattagagcttacattttcaaagtagaaatgccagtcagatgatagatttctatatttcaggaaaatgaagacaatcagctttctggaaagtcaccctgtaagtgtccatgcaacatccacaccaggcatgagcactcaggctctccagtagggcttcccagcctgctatgattgacagctagagttagataatgcctcatgggtctggggtatgctcttatcttagttgattttcccggttctgtgataaaacactccggtaaaagcagcttgaaggagaaagtgtttgttctggcccacaattcaaagatacagtccaccattgtggggaagctagagtgcctggagcttgatgatgctaatcacaccgcagacaccatcaggaggagacagcaatgaattcaggctggtactcagttccctttatcaacttacactgtccaagatccgagctcaggaatgggagcacccacggtggctgccctcctcagttaaaggttactgtaccccccacaggcatgcctgggggcctgtcttctgggtagctctagattctgccctgttgacaacacgcgccaccacagatgggtgctagagggtgctgagcaacagtctgaactctcctcccaggtgatggtagtatttgctccaactcctgacaaccagaaatgcttgaagacattgccaaatacccacggagggaacagggaacagtgaacaagattcttccagttaggaccacaactcttcttggtttctggtccataatctctaggaaccatattcacagtctcagcaattttgtgaatcaggtgtcataggcattcctgatggaacagaaacacagcccatttactcctgtttatatacctaaggatgcccgtcagattctaaaatctgaatctgtaccctttgtcatcttgtccctaggcactagaacagggactgccaagtcccttctttgcaagtgactctaaatcctagaagcctacctccatgacaacctgagatcatgaaaacattccagtttctatgcccagaggataaagccatgtggcattgaaagcaaggccctttcagatccccatgtcgcctttctcagcttttctccttgctacagcctgacagacagctgtcaggaaaagactcaaagctgggtgtgggtgacaaacacagccagccctcttctgcctactagccaaagcacagtttgttagcctgtcaattgtcattgccttggtgccagactgcatttttaactctctcatcatgcacataaaatactttgctagtcagggaaacccctgtgggagtcacggtcctttgtttccatttctgggacatttctttggtgtcagaggtgtgtctttgcttcagaagaagctagtggataagcagcctgtctgaagaatgcttaggaaaatgacttaaagtatggctggctaagaagaaatgtctcctgtttagttagccttttctgtcacagtattggcagaacatgtggcttttgtcctgtcttgggctagccacaggataatcactgatgcatgcaccatgatccatgcccttaagatccccttcctgtttagacatgtatgtgtgcaggcattcgtagacatgtatgtgtgcaggcatttgtagacatgtatgtgtgcaggcattcgtagacatgtatgtgcatatggaggctggaggtgtggcttagctgtcttcctcaattgttctccaccttatttttgagacagggtctcccactaacccaattttaccagtcctgctagactggctgaccattgagtaaccagggtcctcttgtgtctgcttccccattgtgggattggaggtgagctctgaaatgctggctcccctttcctcttttataccgtggatgctagtgatcagaattcaggtctttatacttaaatggtgatggtaatcactttacccatgaaccatctactcagctgtcctctcatgtgagatctttaatcaattaaccacaccaaaaagatgcccagaataagagggtcctgaaaggactgaggattaaaatgtcagtggcaccttccttcatgacatgcttatgtttcatccctgtgactcaaggtgccagggagtccctgggagaatccatttggttcttcctcctgtaatcaatctgctgcagtgacatggcttccatgtccttctacagagactattagaatcaccagccatattcccgcattctttcaacagtcctttgtggtctgttctatctgcacacccttcacttgccccaaagtgattgccctccctgtttccaccctgatgtttacagcaggtactcaccccactgttcagttttacgtaagggtgatcggggtgtatacaatcttatatccatgtctcatcaccatctcaccctgacagacaagtctctgcctttctgacttagtcctctggaatgagcagcgtccttcagccgagagatgctaccaatgctgtggagccagacattttatttctgagcctgcaaattctgctttattgtgtctccagtaacaactcaggtgggatcccaacaaaggcctgttgaaagtctgtctaaatgagagaactgcaagtattgatctatttctacttccaatgcaaaatagcagctttgttgtgaagctgttcctcatacagccctacaattgattttgagtctgaattgattgggaatgaatggaagggaagccaacagttgcactgggcaggttgaatcagtcagtggagttcatttggccacaaaaaatgctgagacaagattggggcactgagtgttgagctggcattttctgtgaggagacagagagacatgaaccctgcttactaataaccttggaaattcaataacgacttaataccatgacctaacattgacctggctggatcacttcaaaatgtacaagattccctttctctacccaccaagcattgctaggcaagggaagtatgaagagaagagtcccctctctacccacagctggtgcagaacatgttgtgtccaggacttgtcatgtgcacacacagagtcagcctgagtaattcaagcattgtatgcaacagattgagagacaaggggaaggcagtgcaaggtaacagtccagccctcatttgttttccaacagggccattttctctcccttagccatagttacccactcaatagcaaagagtgaacttcaaaaaaaaaaaaaaaggaaatatcaacaagagtactttcttcatgctccatgcgtgttctttcaatcaaatccgtgattcccatcagtttctggtcactcgtattgtgccacacacgctactttatgcttcatctccatctgtagactgtacccttatcatccttacaagggcctgtgaagtctgtcttgatatcactgtttatggataaggaaactgaatcttataaaatgcattaaattagcctgagatcatacatggtatgtgttgatcatggatcaaaatgagatttaaattaaggctactgtgtgatcaaaatgaaactcaagttgaggtcattgtatgaacaaagtaagatttgagtccaggtcaatgtggctccccgggccctgagcatcccttctggtccacgtctctcttcttacatcagccacacacattcctgttggaaggccattcctttccctgtacactctccctccatagacactttagctgatttagcacagggagaattggcagtatgtttacagtgattaatgtcaattctttttaaaaaacattttatttagcaattatttgagaattttgtacaaaatttattttgaagttattcatctcccctcactcccaggttctccttccctacccaagcaacttcatattctttttctaaaaacaaacaaaccaaacaaaactaaacccaacaacaacaacaacaacaaaaccaacatagagtctggcttgtgttggccaactacttctgggcatggggaccgtcctggagtgtgacttgcatatcaggtgtcactccactgaagaaaactgacctcccttctcgaaacagcagtaaaatgtggaggtgtgaacttcatgtctacctagcctactccagggtgagggttccatgtcttgtgcttgtgccggccctgtgcatgttgtcacagtctctgtgagtttatatgtgcaatccccctgttgtgtcttgaagcaatccaccacccctggggccttacaggttttctagcctcctcttccacacagcaaagccagttctttagcatctctccagctgaagagggtagcactggctacctcttccctgggaattattttttcctaataagtttggaaacatctttatccaaattctcattggatggttgtgtctttttgtgttaccatcaaccggtacattctaaatcaatagaggtagtgacaaaggaagaggggaagggcatttttttttattagttttagataaatgtggtgttaaactctctaatatgtaaagcactttctacactatcttcatcgctgtagtagagataatttcaggtaacccacaagacaaagcctgtcagctctgcaaacagataagtggagactgattctcccttactgataccatagttggaaagcctagaccaactcagtttgtccccacactgaaggatggaatgtcacacagaggctccctgacatgtacttagagaatggattgtgttcccttcctcctgtagttgctgatcctgtggcctcactataaataatcaaaatgggcaggcccagggggccctgttttcaatcctcttccacacatttatagaaaggagaggacagaattcttactctgtcttattagggctacagctgatggtaaacaaaggagttgttgcaaagtaagccatcaggggcatggtattgacagcagtggtggggcactgggaggctggtgacacaatgctgtggtataccctgaaggaagaggcaatccttcctcagatccaaggattcctaaataagaaccctaaagacaaccacagaagataggctgtgtccccaaagtaaaataactgcttctatatttgaatgttaaatgtcctctaatgcaaaaattctgttgatgctacaagtgagttacaaatatttataaaaatgggctggggagatagcttagtcagtgacatgcttaccttgaaatcaagaggactgagttcagatcctatgtcagaacctgtgtcaaagtctggctatagtaacgtacctgtaaccccaggattgagatgttgagatgggagatggaggcaggaagtcccaagcttacaggcaagctagcctgttcctgaaagttccaggccaattagatagcctgtctcaaacaacaggtgggaggttttaaggattgatacctgaccacatggatattgtgaacgtgcacacacacacacacacacacacatgtaggggaagctgtagccacaccttcttaggggctggctacaggtgtgcctgaccaggcttgtgagggcgtggtcagagtgacgtagtgtgactgcgtttgcgctttcggtttctctttgctgcttgctgtacaggctgctgacccaccggctggctaggtcgctctgtaaggcttttccctattaaatacccttatatttctacctgactccgtattggtaatttcccactatacacacacacacacacacacacacacacacacacacacacacacacggcgcaccctagtacattcatggagaaaacattgcagacactgggaaactgctgagctgtggatttagcagacacaatgctgctgtctgcatgcctgggctgcacaggtaaccatgaatagacatgcaagtatgtggaatttgcctgtgtacacacaagcatgaatgtgtgcatgtgtgtacagatatgtatatgtagagtttctcttttgtacctttgaaatgcctgtaagtgcttggggagagggttttgaacaatgtgtgggcatgtcagattctctttgcagacgcgctcatttctgggagctgtagaacaggagatggaattttcctaagttatctcaaggagaaatgggtgccaagatataggttataattagaatttgttaaagtgtattcttggcagctgcctatttagtacacattttgtgtgttttccctcctctttcaaggtgagagtcaattgcttgccatcttttagcatcgtgtaaaattttctgaagaagatcctgttgatatgatgaaatatggaattcgtggtggtgtctggaaaccatattaaacatgtttagattcttgttttctcccaaggagtctgccaaatacaaacgtgacttcttcacagagaaatgaatgtgtcagacaataattattaggcaaaataaattatgtaaactagtacatcttttattaaaggcagcctacccataattcccatactagccccatttgctggtaaattcacccgcaaagtaaaaggctaggagaggaggcaaggggttggggggaagggacacagtagagggagaagacatacatgcaaagcatgagtgttgagctttcagtgttcattccatggaaagtcccgagagaaataacacagagaagtaaaggaagagaattatcaaagctgtgatagaagatgactgctcagaactcttggagagtgtcacgctttttaattggggtgatgagtgatggtcacacagtatggcacagggccattgtacaggtcagcacggatgagagaaaaaacccagagaagaaaacaaaacaaaaagcaaatgaaatccaagtcctccatccatcttaccaggagccacttgtaattaaattatatttaaaaaagcaagatcaactataatggactggcaatcaagtgtccttcagacacaggctaaggatgtaggaagtttacatttttttttttttgagaatgttctccagaaaaagcaaaccaacaaatggcacacacacacacacacacacacacacacacacacacacacacacacacacacacacacacacacactgcccctagaaactagaagacgagtcagtgaaactaactcagactcagagaaagtggatctaatcccaagctaacaagcttggagtgaccgcagtacaccggctaatcttttgtgcaattatctgtaaagcagtcccctaattcacagagaagagtccacagcacctcagtggccagcaagcctgcattatcgcatgcgcctaccgtcctcacgcctctgctcccttctctccttgtccagcaccatccagggtgtagggggattacttcctgcatggtgaccaagtatgcctcagaccctgagccttttatctcctgtctggaattgtcttcctttggttgtaacttccctctcgccttcctgttctgagggaaacttccctgaatccccatccgattttcatcttccttctttctcttcattgctataactccaaagatgatcacatctgccttactatatgaattccttaatttacttgttgtctttttcttttcaaactggggtgcagttttctaagatacagaaacttcggtgtgtggatgtacttcaagctctagaatgatgtttaatatttagtagatttaacagatacatattcagtatctgttaaaatgaaaactttatggcctggagagatggctcagtatgggagagcgcttgctgcacacacatgggtacctgagtttggatcccagcgttcatgttaaacactgtgcctgctgtgtgcatacctgtaaccctagtgctgtgagtgacagggattggaggatcactgaaagttgctggttcccaccctggctctggttcagtgagagtccctgtttcagatgaattcagtggagagagacagaacagggcacctcaacatctgtggcctgcacacatgcttatacacagtcatgtgaacaacacatatgatcatacactacaatcacatagatgtcacacatccacacacacagttaaaaaatgaatgagtcaataaataaataggacccaagtaaaaaggaatggaaggaacgaagaaaaacaatgggctgaaaatgctagtgatgtaattaagaaagctactcttctctcaatatgaagtaacacactgtaaattcccactatttgaagtaacaccctttctgcatagtgcaaagaaacagggaaaagtaaactgaattggtttagtgatgacttttcaaaaaatttgttttattactgtcttagctaaggtttctattgctgtgaagagacaccatggccacagcaactatgacaaaggaaaaacatttaattagagtggctcatactttcaggggtttagtccattcttgctgtgctatgatccaggggcatgcaggcagacatggtactcgagaagcagctgtgtcctacatcttgacttgcaggcacgtggaagtggtctgtctcactggacatagcttgagcataggagacctcaaagcccacccccacagtgacacacttcctccagcaagaccacacctccttatagtgcatcccccttttggggccattttctttcaaaccaccacaattagtttatgtctatgggtgtcctgcctgcatgtaggtctttataccatgttcatgtgcatgcttggtacccatggagggcagaagaaggtcttagagtccctggaattggagttacagacagttgtaagctaccatgtaggttctgggggaccgaacctgggtcctcttaaccactgacccatctcttcaacctctagtgagaaactgaaatgacttttatgtggacaagggtttagttgactgtgttaagagacacagacttcaactgttctgagaagatgctttgatcctgcagaatgatttgctctgcagatttggcctccgatgaagaccttcagtatcatgtggacccgtgctaggaatgcaggttctcaggttctagaggagaaagttcgggttctcatttgtgtttctaggagatctgactttgggatgtgtagagtgttgcctcctgactcttttgggaatatcctcttctccacaccacagatacacacacacacacacacacacacacacacacacacannnnnnnnnnnnnnnnnnnnnnnnnnnnnnnnnnnnnnnnnnnnnnnnnnnnnnnnnnnnnnnnnnnnnnnnnnnnnnnnnnnnnnnnnnnnnnnnnnnnnnnnnnnnnnnnnnnnnnnnnnnnnnnnnnnnnnnnnnnacacacacacacacgcactcatgcacacacgcacacgcgcacacacacacacgcacacgcgcacacacacacacgcacacgcgcacacacacacacacacgcacacgcgcacacacacacacgcacacgcacacgcgcgcgcacacacacacacacaacactcatgcacacacgcacacacgcacgcgcactcacacacacacacacgcacacgcgcacacacacgcacgcacacacacacacacacacacacacacacgcacacacgcacacacacacacacacacacacacacacacgcgcgcgcgcgcgcgcgcgcacacacacacacacagcatcatcatcatcatcatcaccactaccataatccccatcgccaccttcatcatcatcccagatctgttttccactgcatcatactcacttctaactactgtcctcagtacaaataaggcaacattgccccatctttaaacagaaaacaaagtttctttttttcaaatcttccttgagttccctttcccttttagtccatgtcccattttcacctttttttatagcattactcaaaataattctctgaaaattctgtttctcttttggacacagaatcgggtattcctactaccactctgctaagtggctcttcccaaggtcactctcagtgcgctcttcggaggcatactccctccccactgtccttgaccatcagtgtgccctgaaagcttgctgcactctgtcagctcctcttgattccccttagtgtcctttgcttgtgtcttctatgttttagaatcctttgtccccaaggtttctcgactcattgctgaataattttatctgttgatgagctgttttctacatcttaacccaacggttgcagtgaatccagagtccaaacacagactctggttcactataaacatttggtgcttattagattccaggaacccatgtccagttctgagcccctatacaccccccccagacttcctccttcaccgcctcagtcagggcaacccaccctttcactgcacaggcctccaacagtgtgcgtttggctgagttctctctggagccacacctgaaccaacagcaaatcctattggccctctgaatgtaaccatcttcattgccacctcattccagctcatcaagacatgtggcccaagggacacattgctggtggcacttcttttctggtccatggagaatgattgtcagcacagcaccgatcagggctcaccaccccgctcagatgcttactgtgagctccctgtaagctggtgtgaaaccctcacctccgttctcagtctttcctgactggttaccatttccatcttaattcctgagcacactgttattgccacactactttcttaagtaccctgggcacatttccacctagggtccattgcgcgctccttttgtctggactcaatcttctcagggtgtctatactgtgttcttcccatgtaagttctcgaaagtcacaatccggtggttatgcaggcaaccttggaactcttactttttctctctgtgcatcccagcattatgctacgtggtctgtttggtgtggtttattgtctctctttgacatcgaaagacaaagccaggaaaatataagtgattcatagtctgtctcctctggtgtctgcagcactgcttggctcatataaaacaattcttatgtgttttcttcaaatgattaaaatcttgggctcttattatcaaagcctatgtattatactcacctataggcttaagggaaaatgtaacacccttgtgcttttaagagcaaggaatttacgtgttttcatcgtaactttgtcaatactgatcctcttccacttgactcttaatgactcaaatgttggactgggtctgttttgctcacaattttccaaggtcataatgggatgtaggaagccaatcacttgctttgcacaaaatttaattcagctttataggaagaggctaagcaagcccaaagaaccagccactgagattcttaatgtactttaatggaataatttaacaaatcaaaatgagtcaaatatctatggacagcacaccagccacttaggtggtgataagaccttcattgctgaatcctttttgcagtacccctcaacttagtactaggtgcatttcctgatccctgagaagcgtttggggaaaggctgtctgaatgaaaagaggaatgaaggcaggtaaaggagggtgagaccgggaaccaagacttgctgtagtcggccactgatcatggtgcctatacatatggccattagttgaagccctccccaccttgtacacttggagaaactgaggtctggaggagcagacaacctgcactgtgagttcctcaccccagccagtggcagcgctgggctccacccagcttcatgggttcatcagtgctaagaagtctgatggtctgcaagaccccaggagatggcccaggaaaaagggatctaagcaaattccttttacttttacagagcaagttcacgtggacaccagaataaatcctgaaaacacaggaaaaacaaagcccacagatgtcatgatgtaaacactaggctggagacattaatgtggagttactttctgaagcattctgaacatatggaacaagttaggaggctggagtattgcttttttttaaaatgacaccactggcttcaggacccagagtatggtataaaagtaatgaaaattaaggcaagaaatcaccctatgttttctatagcagagtttgctctgattttctgaaaaatcctcataaatggtggaccctcttttccattgagaacatgtgcatggcatcctctctggaatacaaccaccctggtcagcttggcattgagtggtggttggcttgctagagaacatggtgtcgatttcattgcaaggggcaatgaccttagccacactcagttggaggctgtgtgaccctctatgttgaatgtctactgaaggttccccattcagaatgtatagaggtggaaggacattctcagagtgttgacttggtaaccgaagcgacctttgtgccctgtaccagtgcatgctctccagaactttctagggaatagtagagttctactgcagtccacaagtgttggcatcctttgaaagctgagggtgaggaggctttcctaattgaagcctatattttaaaacagactgcaaaatgcttgggtggtgatatgggttcaattccagaccatctgcaatggaaccacgtaggacagggtctttagaacaaacagcaccatctccaccagatcaactgtacctgcttgcaggagcccatcatgatggggcttgtggactgttggcatttttgtcttaggagggtgtggggaaggtcattccagatgcttttctcacccacacagtttctcctcaattgcaggtggccatgctggagcctgaggaggaactataatctgcaggctgtgggggttaattggaaggatgtggggcagctgtgattcctgttggatgagactttcctgtgctgactcttccatgtcacccatgctcccacaggcaaccccttagctctactttgtaagtgcaataaattcattgtgtcccaagactgagctttggtgaaatcatacttggtttgtccttgggaacttatgaggaaggggtagacggatgtctccttgaggatgagtcattgcagcgcttggcgtgggtggcaggatacagcaacaccagagctgagtttgggggtagcagtggcatccatctgaggatctgatgtgagtgctgagacaggcaactgaagactgagtgacagggactgtggaggggaccaggtatccatgacaggagccatgcatgagactagtcactagacaagcaagattgtgttaactagagggttgggaaaacagtttattcagtagggaccttgggatgggggtggagctttaggcctgtgataagcctgttattccagttgctgtggcagaaggagctcttgtagggtggaaagcccaacagctaattccctaataaggtagccgggctgcctgctggtccaggactgtgcaatccaagtgtccaccaattctagtggccaggcatacatggctttaccctgttcatgttgtagaatgctgacctagaacaacggccaacatccttattagatgttgtgaatatttgtatgagaccctcaaggttagatttgtggatgatggatgttccctctggactaaggtgctgaggagggctgttggacctttacttgggattagtgctgcctctgctagccatcagggtgcagttctgctctaattgcatatgcatctgacctaaggagtgctaggggatgggggttgggggattcactgatagggcctccatctttgtgactgtagcagagccatcgtccacaccgggagaagactttccagtgtggcctacttcttccagaaagggtctgccctttaaagtttctagaacattccaaaacaaagccaccagctgggaaccaaaggttcataacagaaacctgctgggacagttcatgttcggaccatagtgtttctcttttatgtgtacatgaacttctgagctcctgtgaagtccccaaggagacagaccctccaagtcaccacatacacaggaccgggagtgcctacccactactgaggttttatctggtgtgttcttgagaaccagaaacttgactctcattgatttttgcagcatatatgaaatgattctgccataagtcatcaaatgccccagcagaagccaagaagacattgtagagcagtagtattatacttcactgtagtattatatttcactgtggtattatatttcactgtagtattatatttcactggagtattatatttcactgtggtattatattttactgtagtattatacttcactgtatattatacttcactgtagtattatatttcactgtggtattatatttcactgtagtattatacttcactgtagtattatatttcactgtggtattatatttcactatggtattatatctcactgtggtattatatctcactggagtattatatttcactgtggtattatacttcactgtagtattatatctcactgtggtattatatctcactgtagtattatacttcactgtagtattatatttcactgtagtattatatttcactgtggtattatatttcactgtagtattatatttcactgtggtattatacttcactgtagtattataattcactgtggtattatatttcactgtagtattatatttcactgtagtattatatttcactgtggtattatatttcactgtggtattatacttcactgtagtattatatttcactgtagtattatatttcactgtagtattatatttcactgtagtattatatttcactgtggtattatatctcactgtggtattatatttcactgtagtattatctttcactggagtattatatctcactggagtattatatttcactggagtattatatttcactgtggtattatatttcactgtggtattatatttcactgtagtattatatttcactttagtattatactttatagtgggaaattaccaatatggagccaagtagaaatataagggtatttaatagggaaaagccttacttacagagcaacttagccagctggcgtggcagcattctgtccatcaagtacaaaagaaaaaccaaaagagaaaacgaagtcccatgcaagtatggctctacgtcaccctgagcacgccctcgcaagcatggtcaggcacacctgtagcaggccctaagtaggtgtggctacagcttcccctacaattccccttttagtctaaaagaggattaaaacttaacagtgtaaagtatccaaaattaacaatcataaaggtgaaatataagacacaacaatctgcttatgtcacatcctaactatctattttaactaaaccctaaagtcaactgaaagaggtgtccaagcctgaacacctccttccaatcccaaccataaataataggaagctatccctaactaggtctatacactatcctaaatgacaacaagggggaaagggggcgtagcatcctccaagttacttcctgctgaaatgggacaatgatagacatgtggggtcctgtaggaagaaaattttagtatagtaaaagtcttgaatgaattgtaaacagtccatgttagatgggattcacttgattgaagatctcgcttgaaagcctcaacttgattgaagtcagtacccgaacctctggccagagtgtcagttgaaatggagcaagttggatccagtgcagtcgaggaggtgtggcccattttctttccagggtgtctaggaattgctgtcaggaaggtctttattggctgtgtgggactcagacataaacagttagcagagaaatgtttgcttgtgtatgtacacatgctggggaatgcaaccatgagagcataacaattatgagagggtgtacatcttgagagaaagttctaagaaaagacaaagacagtccccgaattcttcttttattctgtattacatcaattggcttcttgatacaatacagaaacactaaagtttagttaaataacgtgcttggattttagaggaggaaagccaaatccacctctaaatccagcattggtttaatagaatagggactaggaaatgaagagaaatagagttctttgagagacagttgtaaagtttactgtatgacacattccttttgtttgaaggttatagctaccttctcttcttaagtatctccccatgcagtgtcctttgccctctggagatgagttttcctatgaaaataaaagcaaaacacttccctttccttttagaggtttctatttagtttataagatataccttagtagaatacctgtcatttgtcctcatcgagaggtttttccttttctagtcgaatcttgatcaactttgatggtatccaaagtttttcttctcctgtagaaaccaatgtaaaacccttaccccaacgtaacacatgtcctggtttccatacagaggttagtacatctttgaagtataccggctgattgagttcagttttttccgtagtccagtgtctttctgcagcagtttgttgtttcttattggcattaagaaagtttagtgttaataaagcattatgcaacctatgtttggggggtttagtcttccaagcctgtttgttgagcatctccttaagtgttctattagatctctcaaccactgcttgtcctgtaggattgtgtggtataccggtaacatgctttatgttataatatttgaaaaattgttctaattttgtagagatatatgctgtagcattgtcagtttttatttgtgcaggtatacccataactgctatcacctctagcaggtgtgtaataatagaatcagctttttcagagttaagagcagtagcccactggaactctgagaatgtgcctatagtatgaagcacatatttcaaatttccaaactctgcaaagtgaaagacatccatctgccaaacctcatttctccgaatgcccttaggattacaacctgctggcaatggagttttattataaaaggaacaagtaggacagtttctcactatctccttggcttgttgccaagtgatggagaagtcctttttcaaacctttgctatttacatgtttcttatgatattctgaggcttctagcatacttccaattaataaacgatcaatctcatcattgccttgtgatagtagtcctggcagacccgtatgggatctgatatgtgtaatttatataggattacttctgtttctgagagtttcctgtaattgtaaaaacagagaagttaattccgtattatcaggaatgaattctacagtctcaatgtgtaacacaactctctctgcatattgggaatcagtaactatattaagtaagaggttctgtaaaatccgtaagtaccatgagaattgcatataattctgccttctgtacagatgtatatggactttgaagtactttacttacctcacatgctttataaccagccttacctgatttgttggcatcagtgtagaaggtaagaactccagaaatgggagtttgtcttacaatatgtggaagaatccagactgtcttttttatgaatttaattctgtcagttttgggatagttgctgctaattgttcccaaaaagtcagtaagagctatttgccaatattcattatccttccataaggaggaaatttcttcattagttaaaggtactataatttctgctggatcttttccagtcagttgacgaagtcttaattttccctttaaaatcaaatcagaaatcttttctatatatgtctttaactttttattctgtttatgtggcagaaatatccattccaatatagtatcttccctttgcatcagaattccagaagggtattctctggatggcaagataaccagaatacagtctaaatcaaggtttatccgatctatatgtgcatccaatattctgttttccaccaattgtaactctttctgcctcagcagataatatcctcagactgtttaggtccttatcatctttaagggccatttttaaatgctttaagtcatgtccttctacaccaataattgtctgtaattgagaaatttcccctaataatttctgaagagaattaagagtttgataatgatctctcctaatttgtaccttttgagggctgattctttgtaagtctatcttgtaacctaaatagttaatagaatctcctctttgtattttttctggggcaatctgtaacccccaccgaggcagaacttccttcatcatttcaaatatacgtttcaaagtttctttattagaatctgataaaagaatgtcatccatgtaatgataaacaagagattgtgaaaatttcttacaaattatttccaaaggttgctgtacaaagtgttgacacaaagtaggactatttagcattccttgtggcaaaactctccactggtatcttctaactggctgtgaattattaagagttggtacagtaaatgcaaattttctctttcattttcctgtaatggtattgtgaaaaaacagtcttttagatcaatgactatgataaaccatcctttaggtattacggaaggtaatggcattccaagttgcagagatctcattggttgaattaccttatttatggctctcaggtctgtcagcattttccacttacctgacttctttttgataacaaatacaggagaattccaaggattggtagattcctctatatgtccagcatctagctgttcctgtactaacttttctaaagcctctagattctcagaggtcataggccattgtcctacccaaagtggttcatctgtaatccacttcaatggcagagcctttggtcctctgaaggtccatcatttgtacttagtttttgtacagcatagatggttgttaaccgttttccataacgtcttaccagatgttttctactatataaagattgtacataatttgtatctgacattggaggaatattaatctgagtattacattgctgtaagagatcatgaccccagagatttatagctatatctgccatgtatggtttcagtatccctttctgtccttctggtccaatgcagaccaccgagttaatgctctgttgaactctagatagagttccaattcctataaattgcacatttgcctctctaagaggtcatttttgaggccaggatttttgggtaataatagttacatccgccccagtatctactaagccagaaataactttattattaattttcactttcaactgaggctttttatcattaatagaagcttgccaaaatatgcgtttctcattttgtccattcacatttgattcttcatcactattcaaactacaatctagagcagtatcatttttcacaataggcaaagaactatcctttggtcagattgtgacagattgtctcccactgctactgggaatgacctgacctttctcgatgtggggggattcttgaggccaccccttggggtttcccgaccttaatgggtttccttgtatgtccctggttgatctacattcattggtccagtgtctgcccttaccacatcttctacacaatccagaaggcagtggccttccatatgaggcattgttagaatttgtttgtctacaatttctcttagtatgtcccattttaccacagttgaaatatctaggttccttgtgccttggtggtcgccagaggaaggcttttcctatccaaggttctggttcatagtactagtaacctctagcctcttggtacctatgttgacctctgtaaggtgcttcttcttgccaagcccttacatcctcacctctagaacttttaattttctgttgccattttaaacctttggagatggcttctcctacccaagctctagtatcttgcacattatagtcaatgttggctacatacaaaacccattcttctaggggagctgatctgatctttaaaggcaaaagtattcttttgtatattgggtttgcattttcataagctattgtatatataattgattgtcttgtttctggatctgttacctgtaattctactgccctagttaacctttgtaagaagtcctggaactgttctgtaggtccctgttctattctggtataagcttctaggtgttctcctggctcacgaaccttatcccaggcatttaatgctgcttttctgcatagagacagtatatcatcatcatattcagcctgaacctgtgggtcagcataaatactctgaccaagaatcttatctgggggggcttcaaaaccttcctttctgccctgatactcaaggagctttgcctcttctcttactaatgccttccactggatttggcatgaattctcaagtacagctgctaccaatccttcccaatctgtgggtgtcaccctgttaaaggttgcccatgaatgtaatagctgttttatgtatgggctatggagaccatatgagacaactgattctttaatattcttaagatccttcagctgtataggttgccattcataagccatccgtccatgagggtgtttcttagaagctggcttttctaccatggtagctgggtacactaatggtgtacgagtaacagccttagaagaatagtcacaatacctgggtggagtaggtgcctgggattggagtgattctgcttctgaggcatctcaatgatctttaagcctagtaatgatatccttttgaaaagtttcaatgtccttaatcataaaagattccaagcatgttaatgaatctgtaaattgctctaactgtttatttacatgtttttctatgtctttaatacaatcatccttaggcagcatctggatggcatggaaactgctttctaggtattggagtctagattcgcgttcatgatttgctgattttgagtcctcagcaatcaaccgtatagacctatgtaatctgtcagccctgtactgtaaattatcttccaaacattcaaatctagactcaaatttgtgatttgctaccttggatgcttcaataattgattgaatggcattgtccaattcttcaaccctatgctgggtattttgcacctttgcatctaatttctgggtaacattgcctatcttagtttctcactggctacagatattctttagctcatcacggttttctgacagcctagcctctaaggcctcagacatggcataaatatgctgcatctcatctttggtaacagacagctctgtctttagcatattggatacagtgccaagcttatcatccaatttctgttccacttgctgcataattgtggtctgaactaatctgttctccaaaatctcattgtgtaaagctgttatttcctgtaagtaggtggtgaggttatccttatccctattcctgagtcctctggctagtaatactatttgtaccagtaagctaactgccattacagcatataggccagtaattgtcaaatcagcatcctcctcaaacagtgaattcacgtaataagcaaaaatattaccaattttagcaaatgataaatattcccccataattttacctgatttctactccagatgcagtaactatctttgaccagtgggtggcacaggtgttcagttagtccacggcgtttggcagtggtgggtggcagtccaacttggttcaagggctggaggcctccgggtgcgggtaggcagcagtccaagctggtcccgagcacacggtggtaaaactgtaggaggtctgtgtgagtctccaagctgggagcagctcagtggcagcgggtcagctgggagccgggaacacctgtgaagagagggacccacagcctgtcccaaatggggtgtaggtttccaatatcctgctcctgacaaccagatatagtgggaaattactaatatgaagccaagtagaaatataagggtatttaatagggaaaagccttacttacagagcaacctagctagccgacgtggcagcagtctgtccagcaagtacaaaagtgaaactgaaagagagacgcagcccctcaaagtctcactctacgtcaccctgaccacgccctcacaagtgtggtcaggcacacctgtatccagcccctaagtaggcgtggcttcagcttcccctacaatacttcactgtagtattatatttcactgtggtattatatttcatggaaaggatagtgagaatagtggtttacaatcacattcccttcactcaaaaatggttttaaaaggtcttaccggaaaaacaaaacaccaaaccctctatgctcctattgctggacagggagagaaataatatagtggtttatttgaggacttctcataggtagaaagtgaatgttgttaggaatagtcaagtttccaaggctgaagcacagaaggaatgcttctgagaggatggctcatgtgtccctggaaggcgccacgtttagaaaataagatggggagtgggtgaggtgccacccagagggggacgggcctgtccaatgaccctttgagttgttaagctattagattggtttaaaccagcagttctcaacctccccaatgctgcaaccctttaatatatgtcttcatcttgtggtgaccactaaccattaaattttttcattgctactttgtaactgtgattttgctactgttgtgaattgtaatttaaatatctgataggcagggtatctgatatgtggccctcaaaggcgtggagacccacaactcaggacccactgacctaaatcaagtgtgtgtgtgtgtgtgtgtgtgtgtgtgtgtgtgtgtgtgtgtgtgtagggggacagttgttctctggtctcttaacatccttgattctggtcaagttcaacaatttctacaggacggtggtgacatttgagcaatgtgctttaccaagcgcactggcccaaagaaaagccctgctttcttgggtgccaaactgctacccaggtctctaaagtttctagtcttcttgttctcccctcgtgtgttctctgtgcacctcgaggcaatagtgtctcttcttattgtgtgtcccacaggtgacaaaagtctatgcttaccaagtttgcatttgtgcttttaatgaaggggattgacagatggcattgtcacagtgttttcaccaatagctaggagtgtagaaacaagaattcagaaaaaaaaagcagtcaaaaagatcagccttgactgtgcctgttaatacatgcttataaccttagtattcaaaaggccaaagtaggaagcttaagagtaagaaaccagcaggggctacacaaggcaaccatagctcccgctcctgcctttctttgttttttcaagatagcatttttctttgtagccctggctgtccccggactttctctgtataccagactggccctgaactgggagatctgcctgcctctgccttccaaatgctgcaactaaaggcatgtgctgccagtgccaacatacctttatggctccccagagccccatgctggacagttatatgctatacattagattacatacatgattcatctcaagtgtgggtcactgtcatgccttactgtttctatgtgtgttgactcccacacaagcagggagtgtatttgctgttcatcgtccacaggcaggaaatggccatgtgcaaatggtctagttttaaaatgatgaaatttatataaataattctgatttcaatttaaaattacttaccccttagcctgcaaattgatactcctttcctttttggattgtatgtatatgtattcattagcatgtgtatatacttgcccttctttaagaactgagaaataagaattaaaaactaaatcattaaaagtgttcacattattttggagaagataatagaagatcagttagtcttctgctcagtagcatgaaagagtggaaattgcgggtactgcctgtgggaatcactaaaacatagaaccgtgcatttaaaagtacgtcttcattaacacagctctgctagccttcctgcccaagcacagctttggcctcacaggatttgaaaaggaaaggcaccgaagctgaaagcctcatctgcaaggtcctcatattgtaaaactgttttcctagtagatcagtggaggtagaagtcttggagtaacaagatcaagtgctaaattgtaaatgtattttctagacacttctagaaattagctatgtaagggatcatatttaaattattagaccttgtgtctatatttgtgacattcgggagagtgaggcgggagaatcatgagtttgaggctagcctggggcatccagtaggtcctccttcgataactaaacaactaactgactgactaactcatgaaataaatgaacaaatacataaatctggccaatagagataaagttatataataaaatgtccaaatctgggtatgagggatgaggacaattacgaggtagaacttttgagagacgtacaagaatacgattgtggaattactcctgggagggagaaactcaagcctgcagtcagagcccacaggtggcccagaatgaatagggagttcgaggtcagcctgggcaacattgttcttgtcatgagtaaacagctttggctaacaaaaatcctttcaagagcccccttactgtgttctttcagaataacccgttgcttatgaattatattctaatttcagatagtttaattcattgatgtgtgacccaaatccatgaatgtagaatctggttacgatgggtgaatgtcaccctgtagaaatcaaaggtctccactgagagtgacaggatggccacctttgggggatagcattcctgaaggtacttttcaatgtgtgtgtggggggagggttgctcacgtgcttccacaagtgggggtacacctgtgtgcgtgcatgtgagtgtgtacatggctttttgagacagggtctctcactgaacctcatccattttattggctagactgcccaaatgtcagtgtccaggatcagcctttgtttacctgctcagcctggggattgccagtgtgtgccatcaagcttgggtcttttcatatcaaggcttctgaccatcaaactcaggtcctcatgcttgtgaggcaaatactttgtggctgtagctagcccctggcctcaggcacttgcctcttcccctgccaagtctttctaagaattttaaagatcaaaaaatgtcacataagatttcaggttgctttttaagatgtccagatctgggcatgctgggtgcttactccttgaagagaaccatgggttgggggccattggagggagtccctgccatggggtgagtaaccaggacaccttccacagtgctctcctgttacctcttctaaacttgctacaccatggaaccaaacccttttagtcagtcttcagaagcacagatttgatgactgttagcctacccccaaaccatccactccaaaattgctccagagacccatcactgagtgctttgttgtttaatgtcctgttggcagttgctaactttcattcccaccctgcttggtggattcatttggctctctttatgtgttcctcaattctgtctctgtcccagcctgcaactcagcctcagacatgggtgccatatttggcatttttcttgcaccatcctgggatattcccatccattcaggggtttggttttgttctgtgtcgggactgaaagccaattcttctcatagatgtcatattgtgtgagaccctgtccagggaattggaatgtgacagactttactgtgtgtaatgtgagagtatgtgtacatgtgtccatgtgtgttcagatgtggaggcccagagggtgatgtcatgctctcttgtgtcctgctcgattgccctctactgtatctctcactaaccgaacctgactaaacttggagcttgccagtttggggctaggctgggtggccagcatgcctaaacagttctttagtcttggcccactacagtgctgggaacatgcctgggcttgcctggactcaaggggaaagccttagttgtcccagctgagcctatcttggaccagcatgtagttaatcaatgccatattaaagaatcttgctcaggttatcagtcccctacccaacatgcttgtacaagccctaatgacaccgaatttgtcatgctgacccatataatagagaacaacaagaaacaccctgcttctatagccaggagcaatggagcaagagagggcagaaagatggtcagagtcaacagatcaggatgcctgctgctctatagtgtcttttagacttgacaggcaagtcacagccgtgaaacctcacatagtgaccacacaagttggcatgctagtgttggatgtgtgaaatttcacagggcctcatacctaggcgaagagctgcaggcagtcaatggttgccaacacaggaagaatttgcttccccggggaagaactcccagatagattcttcaatcccaagtactcatccctaagcacatgtacatatgagcaacacgacatgggctcagtgtgtgtgtgtgtgtgtgtgtgtgtgtgtgtgtgtgtgtgtgtaaataataacaattaaagaagaggtcaagaatttgagagggaggagggcagaatgggaggagtcagaaggggaggaggcaggagtggaaatggtataaatacagcatgcatatgtgcaattctcagaaaaatttaaataaaaatattctcaggaaaaaaaagaccattgtccaggtcactgaggtggaaagcagacacagtactcaataatggttaacagactcggttatccttcttgcggagttgtagttgtgtataagatatacatttcagggttggagacatggttcagcagttaggagtgcttactactcttgcagaggacccatgttcaattcccggcccagaaggtgactcacaaccctctgtaattccacttacaggcaaatgttcatacacatacattaaatataaaagatttaaaaatatatgtttttcattttgttcagatgactgcagaacctggaaaagctgttgctgctattgatgcataacatactgctcttattggtctgtatatatatatatatatatatatatatatatatatatatatattgaatttttggaaactttagctgtgctgtcaactttggaaaaaagtatcccagtttaccgtgttgagttggcattgtacagaaattaacagccatattggtctagaaatgttgaacttaagttttttccatttgtacaggggtaacgcactgtattaaatatgtaaggtcttatctacgtgggtttgattacaaaaactaataaagtattctctaaataaaaaagaagtatcttgaaataaaatgcatacaatgtatcagttctgttgtaaatatgatggaataaaaatgagattaatattcttaaggaaaaaatatatgtttttcttgtgaaagataggcaaatagaaggagcttgagttgctacatacttaatatgccttgggatatatttgtacttgtggtaagtctgtgtgtgtgtgtgtagtgtatgcccgtgtgtgcacaggtgtgtgcaggcgagctcacccatctgtgtgcatgtgaagccagaggaggtcatcaggtgtcctattctccattctctgcctcattcctttgaggcagggtctctcgctgaactcaggacccccagttttaggctagattagctggctagtgcctcttcttcctttgtcctccaaccacccccagccctgggctttcaggtatatgtggccttgtctgttttcttcacatgggtgcagggggcctcctgcttgcactaatcccctgagccagaacctcaggccctttcccaaatctttttaaaaaaatattttgatttgaccaggagaaaaagagaaaaggaagcaaacagaaataaagaaaataattgaagggttgttttaggataggttggtttgattttagagaaaaataaatgtgtcatctaaaagttggatgtgttctgaggacattcaaacccaatgtttgtgttacaaatggcattttaagcccatttccacaaaggcaaggggatgtaggactggcatgcggtgatgatttccaacaacccctgcatttaccgctgcttagaggtctcagtgccgagctgtgtgtggaaaaagggcacatctgcctcggacctcagaatgctggcagtgcctggcagacacttatctgagccacacgcattaggaatctgggatggaaacctcctaagaatagccagtctcacgaaatttccaatctctcttgtttttggcagaacttaaaattccatggagatggctcatgtcgcaagacttttctgtgtggtgctggctagcaccagtggggagaacggcctggggaaggaatgccaaatcaacgtggctgtgtgttttcacgcctctgaaaaggtctgggtttggctccaaccaggaaagaacacttgaggtttgtattctgtgccagctttttcaaatgccactcacctgactcgggaggctctgagcatcagcagaaaccaaggggttggataaactttgagtattcttgatgttcagacatactttgaacaagactccttgctgggagaaagaacaggattctgctggagcaggatgttctcacacaccccttgctggggagcagaggaaccatgtcagctgttggtcagaaacccattaggcattagtgatgcctgagatgctgatgtggactgggcttgctttgtctgtttagatggtggaagaagtgaaaagaatggggaccaaattacctactgcagtcagggtatcttttctaccacttgatccttctcatggtcgggtatgctatgctgccccaccgctctggaagtacttctgcctcttatatgacagattctatttctcaaccaaacccagttcagacagcagcctttagtttgccaaccactgcaaacaacttttaggcatggctacatgattgtattttaaacacaaagttatgtcctcagcatgtcacctagggcgctgtaggggcttgatgagagggatggcctcacaataccccccatgtaactatatttccctttctgtaccataagaaccttccaccaatattagattcatccttgtgatggctattcctggttgtcaacttgattatatctctgaaacacaagcagctgggtaccttgtgagggatttttcttaattaaataatttgaactaggaaaaccacctttaatccagatcttctgagatgaggagacccaccttgaatctgggctgtaacttctgctgacagcctgtataaaaggacacagaagaaggaagcttctgttccttgccttcttgcccttatactcactggcattagagcctacttctctgggattccagtgtaaactgaaaaccagctgggacatgcagtctcatggacttaacagctaatggattcttgaactttctgtgggtagacagccaatgttggaccaagcctataagccactctaataaaatcccttttatctatctatctatctatctatctatctatctatctctatcaatatctatcatctctatcaatatctatctctgtttatcaatatctatcagtgtctatcaatatctatctgtcatctctgtcatcaatatctatctatcatctctatcatatctatctgtctctgtctatcaatatctagctatcatctctgtcatcaatatctatctatctatcatctctatcatatctatctgtctctgtctatcaatatctagctatcatctctgtcatcaatatctatctatctatcatctctatcatatctatctgtctctgtatcaatatctagctatcatgtctgtcatcaatatctatttatctatatatctatcttttcactcatcaatccatccatccattcatctgttttcattccatctcttctgttcctctagaaaaccctgactaatacaatccttagcttcaatcccatattttacaaaccctgtgttattcccagagtgactttttttttgtttcagaagatcttgcccatcctcatcactctgccatccttccctagtgtgaatataaaaagggagcacatggccatcagggtactgctttcctaccccactggctggtgcttaggtgctaatttaaagcaacctcacttctgtactctggccccgaatgagtcctctgatgtttaactgtggtgttactcaacatggagatgcagaagccatttcccctgaagcttatgagacagccaccatctgactctgtttattttttggggtgccagcagctggcaacttcatgagattatagcctaagagcccattaatgaaacaaaggtcaggggtcacactctggtccggttagcataactgtttcttctatttccttttccagttccttctacacaggcacgtctcacatgaatcagtgtcatctagcaaaaggtgtcactggagcagagttttcagcagagtgacgaagaccctctcttagttctgaacaacccagctgagatgagcatgttagagtatgttatgttatggacacatgggtgcacaggacggacatttcaaaatatgtgaacaaaagtgagtctatgtctcttgcatgatttcagtagcatggattgtccctgtctgatgggaagatcagtttacttcccgccagcatttaatgcagagggccacacagtactgttctgagcccagatgtttaagatctgggctggaaactccacaacactgatttcgttacctcagggtcaccccacacctcatgctccctgctcagctgtgttttgttacggctttaacagagcaacgatgtgtttccatagtctaggtccggtattggatgacatgccggctgattttggtggtttgagcagaccagtagggggttatacaaaacagagcagtttgctttcccaacagtaagaaaatatgctaagaattactgccgatagtcaaggcatctcccgctccctccttccctgcctcctctgctgctcactctccttttagcctccaatattttttaaagtttgttgtcacttttatggtctctgaatgtccctttgctctagtctaggagactctgactttaattgctttcttatcaaagccaatgccccctgaaactttgttcttactcccctctctccccttttttctctatcccaacccactgaaaacaaaccaggctataaaaccgataacattcctaatgtaaaaaaaaaaaaaaagataatcgatgcagatgcaatttagataaggtgaaagaaataaagaagtaaaagcctatatggagcagggccagcgattcatctgtttgtattaataggttccagtcatagtacaccaggcacagaatgtctgtttgccactgcacttagcaagcacatgggcttaaaaataaactttgacaatgtagatctctttgtcctttcaggaatggaaagcattacgtacttcaaagcccacgaagcctgacttgaaaatatagcttgtccttgtgttactgtggctgtggggtgggactttcagctgcacgaggcacatggatgatttgtgtgtaaatagtacagcagacacaagctagcaagagcaaacgatactggccgctttgataagcccattcataaggaagaagcgcgtctgtcttttaagttccctggaacaactgggatatgactcctcatcttaatcagggttttcttcctgaactaaactgcaaaaacagaggacttgagcagcacatctcacttgcacagagcagcgtttgttcgttttgagtgtttttggacaggaaattgatctacagggtaacattcacacacaaagaagaaacagtatgggacgatggcttgttagttcaagtgactctgttttggacattacggacaagaaaccttggaggaagaacggtgttaaagatccaaagcatgacaactcctgatgaacacgtccccaaatgatgaacccacgagtaaagaggaccttctaccgtaagtatctttgccgtgatcaaacgtattgcttgctgagtagatctctgagcaagtgtttgatgtagggtcttcatttgcagactagtctataattaaactctttgggtgactcctgcagaaagttcatgctggaatgcctcccatgattctgcaatgctggaagaaacttcagattgacttaggagtagtgccttgggtggcaggcacatcatgacagtttttattgttgatgtgctattcgggcaacgcataacccatcagtgtatatctgtaaatgacactgaatccacatgaagatagtttaaactctatgacttttatttcatgtggctcatcctgtaatcagaatgtgaatgtatagagatttacgtaaaactatcaggatttagagagaacctgaactgtttcctgagtgaattttatttatctaccttatcttcctgctgggaagagatgtttagaatctgggaacaggaaggagaaggtgtatggcagagagtagacttctttggaactgacacctggattccttttctgtttcccaggtttatgtccatagtgctcaacaagtcaccttgagactaagacctctcacgtctaagtgtgttgacgtgatcttgcaaatgagaactgagcctattgaaaccttagctctgtgcagatattaaatccagcaagtcacactcttagtgtctaccatgtagtagatttagatgctagtacacagtttagactgttgcatgaagtctgctgatgagttaatctgaatctaaatctctcttcactctcaatttactcatgagtgtgactgagctgtctgtaccaaaggattatataacaatgcaattacattatattgccctttctggcaaggggtttcttttaaaagtcaaattttgaattcaccgccactttggttactcttctttttatttattgtttctttggaagggtatctccctggaacagctcagtctgtagcatagttcagcataattttttcccaggcaatatatatggtcctgatgttagcctgtgtgctgggactctggataagttagcttgttaggatctccctttgttgagggtgaacagacaggctgagatgccggacacaacctctattggactggtcatcttttaggtgcaaggggtgtgaaaataaactgagatatgaattgatgaaatggctccttggagtccagagtgacaagaaaaagtcatttagcagaggagagcagcaaactcatccacaactctgtcaccccttcacagtaccagacagctccgttctggcatttccctctggcgtacttggtgtagtttgttaaactgaacctgcccttctttaccacaagtagggaggagaaatactgtgcacatgttgaaagtagtggttggatcgttggtgtaggaactggcaaaagctgtaactaagcaaaagtcatcagtaaggtgaaatgaaatgctttggataattacatgtagtttctgggtgagcttaaattatagcacatgtaataacagatatgaaaatggctcaggtaaatcatccctttagcagttcaggcaacctagatgtaactttcactggtaacattaccaggtagaaattctaactagagtaagacagtccctagcaatagcccagcagctcttttagtgtcttttcaggctagagtcatctggaattgttatacacacttctgggatctccatcaagaaatgatgcaatgttcacggagttctcacactggcccctgtccgtgaggaaaaggagagctttaggctgtgaaggagagggaagcaggggggagggtgcttcagtggctgtggctctggaggtttccacctgggagtcaggaacacgggttcaaagccagtctcggctgttcagtgagagccgatctcatccacactaaacaatacaacagaactggggaatgtcttcaactggagaaagtaggcataaccctgcggcagttcagcatcgagagggttatgggtaacagatgataacatgatgtttctgctgcacattttgatttttccagtctgcaataggacaccagaagaccataggcagacttgcacaatgtcagttgtactgagaagggtgagtgtctaccactgtgggcagtgggtgtaaaagaaggagggtcaggtattttgagtcaaacaatgatgtgttagaattactgacccaccatttataaatggtaggtagggttttggaaaaattgcctaaatgccatttctgtttcttatatataaaaatataatattatttcttatacttgtaaaggttaaattagatcattatgtcggttgtctgacatgtagtaagtgtgtgataggatttttaaattatacaagcttcagggactaaagttttgagttctgatgatctggtaagtggagctacttagccccaattctttgtttgaattaaacaccagccaatggtgcagatttatagaatatctgttctctgagcactggtcagctaagacataaacgtcaggcaaagtttaaagtgcaataaaaggatgagcaccaggcaggtgtggtggttcaagcctgtcattctagctcttgagaggctgagggaggagattcagcttcagttccaaatcatctcagaccacagagtgaaatcttgcctcaaaagacaagcaaaacaaaacagaatgaataaggcaatcaggtttcgtgagctaaaagcgatgaaggggttttcctgttgtttcccaggcaagggtctaaatccatttgcttatggtccttgatgcttgtaagatcatgtactcggttgactgttgtttcttgatttccccttcagtatttgaatgtagcctggtaaacccatttagaaaacctgctgtagatggtggtgcagatatttgcagcagaagtgaccttctgcaaactcaagggctaaaaatgtctccaatggcatctttccacagtgcttgcaaaaaagcaaagatttctgtgggtaatgtattttgatgatttaatttatcgtgtctacttgttccaagcacttgggcctggccagaattctctcactgctgcctaaacacccacatcccagataggaaataacccagtggttagaattttcaattgggaaaaatcactgacatgtaggcacggccattaaaaatatgatcttgcatctgtatagtatcactttctttcccacaaacctccacatttatgagcttattgtttctaatccctgttgtggaaatggaggctatacttcatcttctgcagggggtgaataaatgtagacatgaggcaaacttgctgaagaagaaggttgggtaggaagcagtgaaacttagcacattgtggaatttgtttaatggctttatggtcatctctgatttttactcagaagtatttgattcatctcctgctctcacatgttaataggagtctcagacttgatccctacttaatactgactttgtgttacaccattcacaggggcccaccccatcagacacaaagacaacaatacagtataactaggttcagcccaactcaggagtgcaaaagtagctgagtgtccgaattcttggtcctctttatatagggagtccgagagtgttcctgtccattcatttgtttttttttgtttgtttgttttacaattcctgttgtgattgctctcctccaagtgaaggagatgccattttcatttgtgtgtgtgtgtgtgtgtgtgtgtgtgtgtgtgtgtgtgtgagagagagagagagagagagagagagagagagagagagagaggtcatcagtatcaggcttgttaactgttgacatcccctcatatgagggcctagggagtatcgctggaccctcatctgagattccaactctcctcccagccatttgcatgcaattctgtccattaatatatgagttcataggaagtgctagagtatatataagctgggggaggttgaggctccatccacgtggctgtgggcaagccatcatccatgctaggtaaagacgtgccatgcagctgctttggggtcatccatgttcctttaggcaagtgctcttctgtgatctgtaaataaaccagggagctcattggtccctgaggtcaaacttgggtagtattgtattttaaattgttgttggtacagaggagaggttagacattgtatcctactcaccagggtaggaattcttgtaatgaggccctgggtgtgctctggaatgtcttttctctatgacgatatggtacagagttggacaactatataccaagcacacttctgtgtttgtatcttaaatgggtagtgacaataataactgtcactctgccccaccactcctcagagacctatcacctgcctctggcaggcatagattctgaggctcatgtcatagacttctgataatttcagccttgcagctgatgtcttccttgcgtaggctgagggaactgcaatttataggtacaagagaaaaacagggagtggtaaggtagcagagctgtctgtttcacaaagataaacaactggtgattgtgaaatgtaacgtgttgattttgtatcagtccagctgtctatgccataatctttgtgtgcatgtttgcaggagggatgtgtgtgtatgtgaaggccacctcaggtatctcctcaggtgccatccatcctaaccttttttagacaatagccttgaactcaccaactaggtgaggctggccagtcagtaagctccagggatctacctgtttctacccctctagctcttggattacaaacatttgcaattatccctggaaatttcaaaagtctgtattaattttaactgtgtgtgtgtgtgtgtgtgtgtgtgtgtgtgtgtgtgtgtgtgtgttacttggctgcttaaaaatgccatcagaatagctatcaaacaagcattgacaagggagtaacttgctgcatcttgtatgcttattatttgcttgaatatatttttttctggaaatgcctattcaaatctttgcctattaaaaaaacaactggatatttttcaagtttttattggtgattttgagagttcttattatgttaaaaatataagtaactgatggggaatgtacttctttgtatgtttatcttgttgattgttaaataaaatactgtttggccaatggcaagcaaggagtaggagtcaaagaggattctgggaaatgtagtagagaagtgatgatccaggcagaaggcttgccagacatagcaaggagactcatatctgagcgaggaaacaggaagtgtggctcttttccccttcgcttctgctccagcagcacaatgtgattcaccagcaaggagggacgccaataaggcgtccgataagataagtcttataaaatatatagatttatgatagttaagactgagctgacagatgagaatcctagtcattggccaagcagcattgtacctaatacaagtttctgtgtattcatttgggccctaactcaggcgggcggctggcataaagctcagccatggcagtggggctcaggcagcttttggcggaaagatttatcgtaacaagtaaccccctccagatctgtgattcacagacagttttcattggttgccctgtgctctatcatctatcataaaaaaaaaaccattatagttttggtgaagtacagttggtatttttctctttgtgggtcatgttattagtatattattcaaattcttttcctaatccaaagttatagaaatttccatcggtgttcttagaatgtttgtaattttaattttatgtattttacatttaggtccacgaactactttaagttaatttttgtagtggagatgaagtatggataaaaaatttatgtacacacacaacacacacacacacacacacacacacacacacacacacacagcatttcctttacactacatatccattgaccattcttctgaaagatatctctaggctactatgccctgttaactctgtgcataatttctatgacttaatattctcttgcttaattcagctttagaattagttatgggatcatgtgagccctttagattattctccttttcaaaatcagttttcaagttatttgccattccataaaagttttatttgtatcttttctctgtctctctcacatacacacgtgtgtgtgtgtgtgtgtgtgtgtgtgtgtgtgtgtgtgtgtgtgatgcatgtgtttatgtgtgtgtgttgcgtgtgtgttcatgcatgttttgcaagtgtccatgtggacaccatgggtgatgttgggagtcatcctctcttgcctttccaccttgtgtactgaagaaaaccttgtgctcagtcaaacctagagcttgctgatatggctagtcttgctagtcaacatgctctggggattccaaccccatcacaggaggctgggattacagacaggctgctaggcccacctgacattgaatggattctgggatctgaacttttgttctctctcgtgcttgtgttgtaaatgctttgaccactgagccatccccatagccactcccctctgagttttcagatcagcttatgttatttacacacacacaaccccatagggtgtaagagttagtccactcacgtgattctggggagaaatggcaacttaacaatgtcatgccttcttcacacagctcttctgtcatcggcgctttgtggttccctcctacaaattctgcacatttaacttgttagattctcacctgaacatgtaaccttcctgagctgttgtaaatggctttccagagcctcagcctccaatgttcattgctaacacacaaatgtgttaggttgatctttatgtagtggctgacgtggccctaatgaccttctttagttcttagctcctaggagcttcttttgagaaatgatttatgttatttttagtatagagcatgtcacttcacagtgacatttctatctcttctttcccagagtgtagctgtcatgttttcacttatcctatcacactggtgagggctttcagtactgtgtggaataggagcacggtgaataaacacagttgccttgttctgttcatagcagggatagatctctatcctttaccattaacatgatgttagttagaggtttatgtaaatatcctctattagattaaaataatcctggtctagccctgagtttgctaagagatttattatggagtacatcttatttttcctcaataccattcttatgactatgtgttatattttgtatcctataatttgttactctgcttaggtatatcaactgaattttgaatctttaacaagtccatgtttagtgttaatcccagatggctaagaagcatctttatgttttatatgttgatggaaaaattagctgagtttttttttaaacatatgtaggatgggatattggcatgaagctttctttgcttgtgctgcctttttgttgaatggtatcaggcaactgctagctttcaaaatgtctcacaagtctacttagaagactcttagactgtaccagtggcatttgcatgtttaagttaattaatagagagaagccaatcattagcaatggaaaatactgtcccatcaagagggtagtgatcttgagaatctataactaataaaactggaacatattattggtaacattcaatgaacttgcatcaaataagtgaattggttagcatgttcattcaaatatgaagtgagctgagaacctacaacattgcccagtctccctgtgtatagaaaacgaaacctgcctatgagtggctctagaaattgataaggctatttccacctctcatatcccttgctaccctgtacaaggtcatagggagggaggggagagagagagagagagagagagagagagagagagagagagagagagagagagagaatgagaacccttctaggctggatggaaacccactctctatccagttgatgatacagatagaagttacccagcttgcatgatgtcagagtgtcagacaagggaggcagaatagactgtttccttgtagtcatccatcagctcttactcttaataatctttcaattttctcttccaattttctcttccacaatggttcccaagccttggagtaccatacagatatcccattcaggactgagcactccaaagtctctcattctctacaccttgaccagtttatctttgtgttaaccatcatcttctgcaaataaaacttgtcctatgatggttgatagatgcagtaatctctggatataatgataagtcattagaactcagtttagtgttatgtccatatagcagacttataatagtagtaatttcctcttggagtctgtgaactttctagacacaggttagtggacccagtaacagttcaatgtgtgattttcaacttgtgtatcaggtcttaaatccagttgaaaagtggttggttaccccaatgacatttgtgccacaattgcttaggagcctatcttgccaagctggttgttactgcagctcacaaggttcacagatggtaagattcatgattacttttcttcttctgtagcattcacagtacctttcaacactatgaatgctagttagtagagatgaggcttccaggtcagtcctagcttcatttctctgtggtctatgattcaaatatgtggtgtcttcggcaacagggtcatgctgtcaagttctggagggtaaccaagagaattggcaatagtttgtaatgctctttgaggggatctagtgcatactttgtccagcttagaaaccttgtcaggaatgaagggcacagtctgactacaaaagtatgggtactcactggctaacaactgcaaaaaaggcaacccatgcctggctctaggctttttgttagcttgtaatgtccagtagggttattgttgccccattatagggtaactccatttaaactctttttatgtatgcatgtgcatgtattttatgaaacttctagagtagcaggtttctatataaacttttgaaatgtctttggtgttcctcccagtactccctcttctagtcttttctgctatgggatacctctctaaaggtattctgtgttatgaactttgccaataatgtttggaaccaaacctagtgcatactttgtccagcttagaaaccttgtcaggaatgaagggcacagtctgactacaaaagcattgagactcttttctcaagtggtctgtacattggctgtgcactggtgataagacttgttcccttgtggggctatggccaatttcagaagacagcttcagaacaagggtgcccagaatgttttcagcatcaatgcttttgaaacccaaaggctcctcagtgtgattgtggaagagcagtcctctttgggatgtgtgaactctggaaagttcactttctactttatgctaagttcccatcattcactctccgtctccctgggagtggaagatctctgatccaaatgtggtgtgcagggagtacctcagcacctcattttgtaaacaccccactccgcctaattcttatcttctgttgggaccagctctttttcaacattgccaggaaagcaatctttctcatttttagtgatctggcattttgaaacaggtatagcatgggctttcatggggtgggggggtgatagttgcatattagacattaagaagtatttttttatagttttttgtttatcatcttctgtgatgtctttagtcactgagtcctcccatgtcgttgtgtgtgccttgccttacacatcatctctcttcaagtctgttcggtagtttctgagcatctctcacaagacaggagaaatgtgtggctgtcttcttgctactaagggtaatagggtgctttctgacatggttccagcccccattttggctggatagctttggtgggcattcacatttaaccacatccttgcacagtagggtgcagaacatttgtaagactccaaataccttggtgggatgcattagaggaagttgcaattgcacacaccccaaccccgctaacctccctggaggctgttccccgccccccatacctgacatgacccaggattggatggttcatggtcccttcccaaggacataggagcatttgatatctctcctcttaatttttttcttttcttatctatgtcacatttatcttttatacagtcgagaagacaaaatgagaactccagagttcacaccagtgtcccttcagccttaaggtttatgggagagctttggctcctgagatttgtgaagagccaataactgacttctgccttcctctttcatttctaggggctgtgagtctgtgggtgactttattagtgggggaggatcatgtgaaagggaaggaattactagaaattgaaggaggcttagctgaatcacacaatgcctgaggaacaaacagaaatggaaagagaaatagctgaattatgcaatgcctgcttacaaacagtatggctgttattacacagctttgtgcaacctacagatttggagactaaaggtggagtcctgaaaatgggaactttggtgttcaaagagacattgctactgtgaaacaatgttgtaaattccttccccaaatctatccttaactttagcaactttctctgaggctggtttgttgttgttgttgttgttgttgttgttgtttttgttttaaatctcccactttatgatcagataggaaagaatttctccttagagctccatgagctctggagtagctagccagcttgccactgaagacgcctcccttttgacaaagcagacccctctatacaacccaaatccaggaagctcagcatgccaacctagtgaacctcatctttaaaatctgtctcctggctttaaatatgtcaatctcagtatttttatagctcgagtggagctctgttgaagtggttagacaatgggaagagacgagagcgtttaagttgagtacaagacaatcatggtcaatggctgcatgccctagttagtgagcctggctatgccactcacagatttggcttttttaagactgttgcaactcacacccattaaccagagagtatgttaatgaacaacagattcaggtttgatgtcagttttcatcaaaattagaaaccatactagactatcgtaaatgtaaaagaaatgacttatttacttgataacaaagcttttaggtttataagtggaaaaaacggaagtgagatggcacagcgccctgctgattctgacatactgatggctgccatcttggatattgctgccgtgttttacatggtgcttggcttgtttttgtgtctcccactgcttcatttgactacctgtgatattactgtcaccaggacccagagaggtgaggggattttccttcttggtcccctttttggttgggacatttattttgcttctggaagatatgtggcagatcactctcaggcagggatggggatccaaataggacaagtgttccaccaggaacagacctgctatgacatgtgggagctcactggcaccactaggcgtcacacggagatgctggctttctctggacaggctgtgtggttgagtgaggaccataggtgtcagggccatgctgagagccacacccactcacacggctgatgcattctccttcctggcacttcaagtctgtacaggcctacacactctcctagatcgaagccctgctctcatgcagaaaggcttgccccaacccacgatgcagatgcactgtgctcggagataacttccagtttctaagctgtgtgtcaggatcttcctcagacttgtccaaatccctcctgaactgaatgacacccccttcacaaaagactgtgtgcccaacatttccactaagagagcactacctaaataccagagcctatccaagaaaaggaaaaacctcagcgatctgtcgctattattgatgcttaatttttgagactagtttcttttcaagtatgtttaagggacataaaaacaggggcagggatatggctcagcgggcagagtacccacatagcatgctcagagccctggtttcaagttccaatggctcataaatagtcacagtgatacccagcacttaataggtagagccaggaggatcagaagttcaaggtcatccttgcttacatagtgagttcaagaccagactggactgcatgagacccaattccaaaaccaaacaaatgaatgacatccaaatcacccatttttgtctttgaatgtattcttaccctccaagttagagcttgcagatcaaaagttgtgtgtgttttcctttttgctcaactacatacatgttgtatacatgacttaaaaaaaaactgaaacagaatcagcacacatgtattccattgaaacttgtatatttggagcagcacaaagtcctgaacatattatttattgagaggtagtggttatgggccaggatttcagttttgtctatcctgagttccaatccaagccctgaagctgaataactgtaattttagaaaggttacgtcatctcttagttttaccatttgctaaatgaggataataatggtttgaaccttgtggtgtggtgggaggagatgaagaaatgagtacatagagctctggtgctcgctcaggagtgaggtcattgtcagtgcttcacaggtcaggaggagcatgcagactcactcttatgcttttacacacgtgggtttctcagatgctctgggtgtgaaaatgtcctttcttcttcctcctttgttctaactccttctcttctctcacctgtatttttcctattttgcaaaaaaagattttattttatgtgcataagtgttttgccttcatatgtacgtacgtatgtacatatgtatgtatacatgcatgcatgcatgtatgcactgcccacaggggccagaagagggcggtggaatccctggagctggagttacttcattaggattctgggaaccacacctgtgtcctctagaggacagccagtgctcttaaccactgagtcgtctctcccgaggctcctctcttactgctatcagttacctaacatcacacctttctaaatgcaaagtccttcacaaaaagtagcacacacatccttctagatgtttccagatctcacaatatacgtgcagcatatatgtatgcttataatcacatgtgaagtatgtacttttaatcatttctgcagcagtgtgaaactgtattaaatataattttcttttgtactgttttttttaagtttaaacaatttacattagttctgtatatgccatgctggctacttttatgtctacttgatgtaagctagagttatctgagaggacggacctgaactgagaaaatacctccataagatctagctgtaggcaagcctgttgggcatttttaatgactgatgtggaaggagccacctctgggctggtggtcctgagctgtatgagaaatcaggttgagcaagccttggagagaaaccagtaagcagctccctccatgacctctgaatcagctcctgcctccaggttcctgacctgtttgggtttctggcctgacttcctacagtgatgaactgtaatatggaagagtaagcaaaataaatgccttcttccctaagctgcttttggccatagtgtttcatctcaggaatagaaaccctaactaagacctatgctgatcactctcactcctcattcccctcccgtctccctcctatccctgtgcctcccccacacaagtatttctttcaccttcacatctgttcattttgtttttgtgattcactgagtttaagcagggcagtgtgtggccttgggttgagagctatccactggagcttgtggggtcagccgtgggtatgcaactgaagacagtgattcccctcccccagaatctgccaatagccacaagtgtagaggggaagtcccatgagtaccccagcatcgtgattgtgggcagagctggtcttgtggggccttctgcagggaacctgagttactgtgagttgatggttgtggtgagggtgcggagtcttggggatgacaatttgtagttctttgtctcatcttctggctcttgtgtaaatcccgagtcagcaggggtgtgttttgaggattcctttgtgtatacatctccttggtactagtgccccagtccacatctggactttcatctactctcacgtgttctcctgtgtatccaggagaggggtggtcggaatgtttacgtttcttcctcttaataaatgtttccagattgtcctctaattttatgcttctatcagcaattcccaagatataccctcacaagtccccactgacagtgctgttactattactgctatttttttctgtcggtctgatggatctgaagtgatgttgtgttttgtggcttcagcttccatttcgtgttagtaaactcagaaaatggttatgcatatgggttggccatttgtttttttctggtctatgaattatctatttatatttgttgctcatctctctgttaggctgtcagtttcttgttaatttgtaaagtgctcttcctgtaattacagcttttaaatcttgatctgtcacccacattgcaaacatgtcttctggatctgccacttatttaatatctttgtttatactatattctgctatgcaacattgatttattagcatctgtctgggtcttccccaggcatcctagtcaataccaagagtatcgttacagttcccacttttaccccatggttcccatcttgtgagtcatgactcctttagtcatttcacaggggtcacatatcggatatcctacatattagatattttaattatgattcatacaatagcaaaattgcagctatgaagtagcaatgaaattaattttacagctgggggaaatcacaacagaaagaactatattaaagggtcatggcattaggaaggctgagaaccaccactctaactcatctacttgtttttgtttggtacctgacattagataaaataactacccttattctctcatgatagatgtccagcccagagctaatgttgctaatcttttttctctttctttttttcccttcctgattgaattgcactctggtcatatgtcagttctcacacatgcatcatgtctctcatgattcccctagtttctgcagatctacttttgtggatttacacatcatcatatttcaaatgccttgtggaatatcccaatacttggtttgaattagttatccttttaattttgcttcatgttattcaaatatgttttcatttcatattacatgaaattcagaacatattatattattataatgtactacaatcatctaacttattgctaagactattattatatgaaatgaagcagtaaaagcattcccccagaagtggtcttacacacatgtacacatgtctgtgtagttataaatcaatacatgtcatgacagtaaggcatatctgtcatgaaaaccttatgttactgaaatattttaaattctgtattctgtagatttctgaagtgtttgaagaccatctatctatttaaaatatgtctggttttaccttgaaaacttacctaacatgactgtaagtttgattgttataaaaagctattaacttgtctttattatctttaatacttttcaaggactagaattttacaatacatttttaatgagctgcatacatacaacaccttaagcaagaatagaaacatgtatacagtataaaaaataaccttaaacttgtatcactataaaaatatcctttgccaatatagactatttgagactggtagttgcttctttagtttgaaagtagattcaataatctacctttttattctatcattcctacaccccccttttttcttttcagaacaagatccctgaatctaatctcctttgtttaatttcctccctgaccatgaccaataacaacttgtaaccaactcccctaaatgatgatacacgtccaccaaatgaccagaaccacacaccctacctcttgagagtgtaggcatcatgttcttaaaataatttcttgctacctgggtgtgatggcatctttaggggactctgaaagatttgagctgaagatcaaattctgggagatctagttgttgtccagtgataggaaattgcagcgcttatctgacgtcctgactggagtagtctatgaggttgagccatcttagcgaactgctttgaagttgtcccgagtagttagtagacctaagttgatctttgtgtggtgtttgtcagcttagtggtgttaccacaatccaggtggaagcattgctgtggggccccatcatcctttcacagatttcaaaggttgctcttaggaatggtcatggttcactgcagaaaacataacatttgaaatgccatatgcagcagatctccaagaggttaaaggactaccatctattaaatacacctaggatccagaaacttaattcttaattacctgcttcagactcaagcttgaaatcacgtacaagaagccagatgaaacctgtatctagaattagttagtactcttatatgatcattcatatcatgaaatatatatattcttataaattttgagataatatttatgccttaagaaaagttttgaagagtcaaaatgaaaaccaaaaggattatgagatcagtggcaatgggaaagtcccttaatactggttttcctctgttccacatctggtggctcttctgtcacaagtcagagacttaggatttcctttaacaagcatgcttgggtttagagaaggagaaagccacattccaactccaaagccagctttaaattttaattgagttggaaccacaaaagaccacttaccttatatgtccacagagaacagcagaaacaaacatttgggaagatttatgaaattttatcctattggaagtgtgttttactattatgccaatttattctttttcttgggacatttgtctggatgattctctctttttcttctgtctcatttgtccagtggtcttcagtttccttagttgtatacttttattttcctggaaagacaaaaacaaaaccctgtcccaaccttaactttggggactttccctttttggcaggttctgtctgatcaaatgtaaggtatttgctagtcttacaagttaggttagattgcatgaccaacatgtttgatgaactattgcctctcctaatcaaaaaggctctcctgtttgagtctaatctttatcagttttgatggtatccatagcttttcttctcctgtggaaataaaagcaaaatctctttcctaaagtaacacatatcctggttttcattttgaggtcaacacatcttttaagtatgcaggctgatttaattcagcattttatttttactatccaatgtctctctcagcagctgtcattcctttattatcagcattttaaaattaactttaaaatttaaagttaatagagcattacataacctatctctgggggtctttattacccatttctgtttattaggaatatcttttaaagtgcaattagatctttttataactgcttgtcctgtagaattgtgtagtatacctgtaacatgctttatattataatatccaaaaaactgcttccatttactaaggacatatgctggagcattgtcagtcttaatttgcacaggtatccccaagatggccattaacttatgataaatgtattgttacagaatcagcctcttcagaactcaaagcagttagttgcccctagaaatcctgaatatgtatctatggtatgcaatacatattttaatcttccaaactctgcaaaatggaacacaaccatttgtcaattttcatttctttgagtaccctacttcccataggtagtggaattcgattatacaaagaacaagcaggatgttcccttgtacttggtttgttgtcatgtgatagaaaaatctttcttcaaacctttgctattaacatgatgtttcttatgaaatactgaggcttctagcacatttccaaccaacagattttgaactgaatcataagggctttgagacaattatttttttctgacttataacctgcctttcttgatttaattgctttagtataaaatgtgggggctccataaattggtgttcaccatacaatgtgaggaaggatccagttcactctctttataaactgaagtctcttgcttcttggatatttgttgctaatctctcctaataaattatttcaagctccttgccagtgttcattttctgcctataatgaggaaatgtcagcattagcaaaaggcaccacaatctctgcttggtctattcctgctaattgataaagtctcaattttcctttcagaataaattcagagtcctcttctacattggtcttcaattttttactctatttttctgcataagaattcctatgggagaatgcacagaaggtaaaataaccaggttacagtcaagctctggatcaaaatgatccacatgtgcaccctataatttctcttttaccaaagccaattctctctcagcttcagatgataattttcttggactatttaagtcatcatcatctcttaaggtttgaaataaattacttagtttttgagttgttaatcaaattgtgggcctcagccagttaatgtctcccaacaattttgaaatcattaagaatttgtagatgatctctcctgatttatactttctgtggttgaactttttgtaaacatatcttttatccaaggtaattaatagaatcttctctttgcattttttccaggatcaatttgtaatcatcgacaaggcatttttttcttcttcttcaaatgttttttttttccaaaggtatctgcatcagatcagttagatgtcatccatttaatggtaaattatagattgagggaactgcttataaattatttctaatggctgttgtacaacatattgacacaaggtggagctgtttaatacaccctatggaagaactttccactgataccttttaacaggttgagaattataagtaggcactgtgcaagcaaatttttctctatcctgtttttgtaaagatataataaaaatagtcttttaaaatcaatcactataatagaccatcctttaggtaatagcaagggaagttcaggctgtaaagagcccattgactgaatcaccttattaatgactcttaaatctgctaaaattctccatttcctgattatttttaatgacaaatataggagaatttcaatgattggtcaggttttcaaaatgttgagcatctaactgctcctgcaccagttgttctagtacctgtaatttttctgatgtcaaaggccagttctacacatacaggtttatcagttaaccattttaaaggtagggctgttggcacctttgaaagaccactagctgatgtgacctgcttatgtataatccaaacaatctgtgactgttctcgataatatcttttaatatttctctcagaagcattcgttattttacagtttgcttctgaggttgaaggaatgttaatttttgtttttcattgctgcaacaaatgacatccccataaattcattgctatgttagccacatatggctttagttttcctctctgttcttctggctctacacactccacacaccttgcactttgattcacctgagataaagttccaatgcctagaagatgaacatttacctcctgaagaggccaatctgaatgccaagatttttgtgaaattgttccatctgtacctgtgtctacataaccctgaatttcaaagccatttatgtgtatttttagctttggtctctaatcacttatagcagtttgccaaaatacttgtattttggtctctcttgtactttttgttgtatctataaagttgttctgtctttggtcacatccagaacattgtggtttttaacagcaggtgttaagtcttttaattgctctgtgtactgttggccatgccagaggagcaacaagtggcaattgaagttccaggtgtcagcccaacagaaggaaactttctgaagggtcaatctcattttggcaaagccacaggacttcaggccctataatgtcttttgcttctgctgtgcctttatgtgtttgttgcttctctttctctggtatctagcatggtgtgagtggatgtggggagatctccactgcctgccatacagtgcatttatctcttggaaacatctccttctacagggcattaatccctgtggattgtcaagaagatgacccctccctaactgtactgtctaatttgataatataataataataataataataataatagttttgatgactaaacataaatacaaggatatgcttcacaactaaagcctatgagttctgccttaggagctgctcaggtcattgctaaaaggcaagctcctgaatccaggtggttctaattctctcagtgctgaaaagaggcagggaggttccatgcggtaaaacaaagcttcacagtaacttgaggttagaccaggtgtcttgctaatagttttaagataataacccctccaaagaagctaaagttcacaaggacacatagttggggttaaatattaggcaactaaacccaagagatctacagatccatggagaatcaatcacccactctccaccattcctgttcaaaaaagaccacccatctccttaggtccctcctcctttgacctgtgtgtccctctagcttcctctcagtccatcagaaaactctatggtccagttagcttagtgtggaccctgcctttcgaatcaaggtctgtctccatgggcagtgtcagaacaacaacacaaaccgagctcccacagcaaataattaccactaactccttgaatagggatagaacttcacatgtaactcctcttacatgctgggccttcatctggcatgggcttgaacaggtcttatgcatgctgtgccaactactatgggttcaaatatgctgctaccctgctatgtccagaagaatccctgaagatttagagaggggagtggaatacataggctccatttagggatgaccacttttgaagtcccttatcctcttaaattttggtcagagtctaagatcagctgtaggtgtgtgagttggtcaccatctgctgcaaatggaagcttctctgatgaagattggaaggtgccttaatctacaggtataaggatgtcattatcagtttgcttactagtatgtccgtccataataataataatattaggttctctcctagagtctgtgatctgtctagtcataggttatttgaccaataatgataccaggaatgggtttcatcttactgagcaagactgacatccaatcagaaagtggttattcccatgaccttataccacccttgcaccagtggacatactctgccaggccagtttttctgtagctcatggggttctcaggtaggattgattaacttttatgcctgcataatactttctgtcactattgccagccaataggggtagagctttcatgtcaggcacaacttgatttctccatgctctatgagaagtgttttatttttttaaagattttaatttactttttaaaaattctgttattgaatttgtgtgagagtaatggtgcatatatgccatgttgcctttacggaggtcagaggctaacttctaggagtcatttgtttctgatgccttgaggcacagtctctctctctctctctctctctctctctctctctctctctctctctctctctgtctgtctgtctctgtctctctcacctgtgaacaggacctagctgtcccatgactttccagtgatggtattatagattcatgtcagtgcatatggatttttgtgggctccaagaattgaactaatgttctcaagattgcatagtacccattgagtcatctcactagctcgaatttttaaacctacttataaagatacttagaaatggaatttctgcatttctacagtaagttcatgcttcacttctttttagagctatgtcattttctaatgtggttgtatgttttgcattcctgctgctctgtatcctcatcagcttttgatgtaatggtttcagttgattttcaggagttcttatgtattctggacacttaaccttggctagatatgtctacagtggatcttttctcccccatccatggattgtctattcattattttagcagtattgcttaataagcataaagttttcatcttcatgaattccaatttatctaaattttatggaaatattccacacattgtgtaagaaacctgtctgcttcaagggtgtgatggcattctttaaactttttttcctacaaaagtatatcatttttaactttgacctttaagtctgttttcaacctgaaattgattttggatagctagatttgttttcatatggataccctgtcccattggctgaaaaagtgccctcctcattgagatgctttggttgactggtcagtcatttatgtatggaaaggactacagttggaccttctcttctgatattgatctagtttccactttacatcagtctttcaactttgtccttctttttcaaggctgtttcaaatacattttagaaccaccttgactgttgcttcaaaatgcccacttagattttgaactttattattgtagctaaaggtcaattgggggagaattttattcttagaggattcactcctgtagtgcttgaccatactacagaactccacttaccaagtcttccactctgctctaagtattcaatatacaaagtttgcaagcatctcttttcagatatctattagcatttagtgtggtttgatgtaattgggtgcagcactgcttcctaaatttcatttcctagtcgtttgttgctaatacataagagcttagtcatttgttgctaatacataagagcttagtagtttgttgttaatacataagagctagcctgactttgagcattgactgtgtgtcctgcagctttggtcaattcatttctctgttttaatatttactttatagacactttatgagcttctgaaagaccatctggaataaagaactggttttcgtcttcttgtcattacttcctttattcttttttcttgtcttattgccttcaccaggtcttaggttctatattatattaatgagaatggtatcctgacctaagatgggcaaagcagaacttaaaagagagcttagcatgaaagagtttctttggaaggcattaatatacaggaccacagtaggtaaaggcagtatagttaatactcactattttaacattattggtgctgttagccacagcattttgatgtttattgttttaacttgtgttagctaaatttcatcagatctgtgaagccactgagagattttcctcttactcatgaatgaacatagaattttattagatgaatcttctgtgtccctgtaataatcacatggtttgcattttgttctttgttgttgttgttattattgggttttcaagacagggtttctttgcagctctggagtctgtcctggaacacactctgtagaccaggctggcctcaaattcacagatatctacctgcctctacctcccaaggcatgcaccaacaccacctggcaacaaacttcttaaaaatatgcccttgctaaattttcactacttatagattctgaagtgatctccgctgttactgataatggccatgttttttttttcctttttcttttgtctttctgtccatctatctgtctgtttacctgtctaactcaaggttctagaaggcaactgtgtgctcagggatgtagatttttcttcctctaagcatcccccatctccttacgtcccctcaacatgagggggctccatctgctcatctttttggaccttcagagagtccatgtcttcctgcaacaacattacagacccattggccacactcaggggatccaagtgtcatgaaagccagtctttcctagactcctcattcagttccttgccctggggttgacagtgctgtcctctgagcttgggtacccagggattggaggttcacagtctcactcttatccccccacatgccatgcctgctgctccatcagtcatagctccctcaggatggatgggtggggtaagagcaggacatgggtacaagttccagggataaggggacaatcctttccatgtcagggctcaaacttcattcattttattttatgatattgaagaaaagctttggaatcatttaatctattacatctcatttgtttccaggactttgcaaaaggacataaaaagcaatcagttgactttctgtctcacacaggggaccctagactcaaagcagtggttgctggcatcagttgtccatccagaggttgaaccatctgagtggtctcctcatcgtgaccccttgaaaaacatcacccaaagtgctgagaaacatttattcctaacacatgtttcccctctctcttttttctctcctcttcaagatgattattacgggagtgatatctagagatgctttatcaatatgttatgatcattcgccagcatcttttgttgttgccatgggaacgattatgctttcaagaaaaatgaataagacttcagttagggtagaaattgggttgggcagataatgctgatgaaataaaaagatgcaggatgtttgtgcctgcaggagaatgagacataaatcagcaattaggtgttttgtctcactactgttgatgaggacacggcatctcatctgggctcatttgtgtgagagctgctgacacactgaagccaacaagagagtcattttgtgtcctgattgctctttgatctttctcaaccacatcagatttttcacttacctgattctaacctgaagatgctcaagtttaacaagttagcaaatgaccagcctggagcctctccagcaaatataggcagtttgatcttccagatgcctatcacaggctctgctgggttatatgtcagttccatgagttttcactttggagattgcatcgttgatgggttgatggtttccacagagagggctctactgtagatcatcatgtccccgaggtgctgtgttgcccagttctgcaagaatgtgaccaaatccccagaaaggcaacttggaaggagagaaagcacatctcacctcaaggagaaaaagtgcatcagcccatagttgctttgacctaacactttggacctgtggtagcatccggatatgcaggttggagaagatctgttcatctcctggtttcttggaagtgggagggagggggaagagagacgatatatataatatatatatatatatatatatatatatatatatagagagagagagagagagagagagagattgaccaaccagaataaggccaatagccttttagctacattgctctttttatctgggcttccaccagaaggtgatgaccgaatttggggtgtgtcttcccacacacattaaggcagccaagacagtttctcaatggatgctcactggtcaggtgagtctaaatatctctaagttgacatttaaaacaaaccatcatggattacttgataagttgatttaattagtagattaactagtcatagaggttgtcaaactcagaaaataaaaaaaaaaagataaaccttgaaagaggaggactacaaacaaatgcaaattaggtagtaatttgggatcccaattaatcatagtgatgtgttacttgatatctaggtagagtgtgtgtgtgtgtgtgtgtgtgtgtgtgtgtgtgtgtgtgtgtatgtgtgtgtgtttatttacatgcatgtttcttatgaattgacaagaatttctgttgtgtgtattatgtggtgtgcatgttatcccattgggtatgcatttatttgtgtaggtgtgtgcatgtgcacacagaagcaagatattgatagtagctgtcttctttgatctctctccattttgtatattgaagagcatatctctgcttctggaattccctgtctctgcctcctcatgctgggaatatgggcatgctgccatgctccccgagttttgatgtgggtcctggggatccaaaccccagtcctcatggttacaggccacacacttacctgctgagccatctctccaggatcaagagtttctttttaaaaaagatgacattgaatacaaatttggaattggctaagcatagaggtaacaacatttttttctgtcagtaaaacatcttcactagtttcatacatccccacactggactcctgctgtttattaggaggtggccttgagagaaacctgagacaaagactttcaaagggtatgtgtgtcctcgatgtttccaaaataagtatttaaacagctcaaattacacattttttccttcctcaagttagttgactgtacctgaaatttctgtccttggacactctctgaaaaaaaaaaaaaacaacaactcatttttgatcttatatagtttggccctgaataaaaggcaaaatattgcccttggatagttatggaaagtgatctgtgtgtctgcagtggtcctgggcttttatctagaaatgggaatttctgttctattgcctgattttgtccttctgttgagtgtgtgcttctgtaagagtgctggtgtgtgcacaccatggcttcatctcctgacggacaattgtagcaattactcggttgaaggacttgctgctaacaaaatacaggcattcattacactgtgagagcagctctagaatgtacccctggaattctacagctttctgagaaatggaagtacatatttaatgattcaagcaatcacggagaagtcttgccaaacatgaactggttacaatagaggagtaattcacaaatattaagctatactcctacttgtcaacccaggtcacagccaggggaatggagcctggtgagctttcctcttcggtaactataaatgtctgtcaacaaatgcttatggtgcaggaaatatagtcccaggactggaagagtttttcattttgtaaatatgagccaaggtataaaacaaagcttgtgtgtggctggagagatgtctcagcagttaagagcatgtggtactcttgcaagggacctgggtttccagcacccacatggcagctccgaacggtctgtagctccagacccaggaccgttaggtgcccccttctggccccatgggtaccgggtgcacatgtggtacatttatgtatgggcaggcaaacacccacacacataaagtacaaataaatacatagtttttttttaaagggcatgtgtcatagtaaaaaataaataaacccttaaagagtgaattatagacacatgtatattcatgcatttaaattttagcgtaatctcagtttaataattccatctgttatgtgaatgtataagaatatgaagctgggagagactttattttctgatataaattactcatctgatgcttatggcttatgcgtccagctctgaaacctcatgggaaaagggttatgtgcagtgtagtgaggaaaaggctaccctctggataaacaaatacaggttttgttgaacctgaccagagccacagacttgacaagattttttgagtcttttaaattctggatcaattttataaagatcaagcgtgattgtcctgcttttatattacaatattcagaaacatataattaaaattaaggtgatgatagttacagaaaacacatttgtaaattttagaaaatttaaagagctttcaaagtagcaggtttccttactgcattttcacaagtacttggttttggttgaccctcccccacctcccctcccactgagaggccttccctctgtccctcagtctctgtcccgaaatgtttccttcctccacattatgtctcctgtgtcccatcgcccacacactgctttcaccctctcacagacccctttcccgtcccccctgcctgcacgctcatgtaaaagatggggtgtttttgtggctttatcatgtgacataaattcaagtattagtaatctagtctgtgccactcagctccccacacataagccaaaaacacacgtggagtggatgattgtcccacagactgttggcgcacccacaactcctacagacttgcacacaccccccaggcagatttgcacacccacaactcctgcaggctggtttgcgaacccacaactcctgcaggctagtttgcgaacctacaaccccacccccaaccccgccccagactgatttgcgcacacacagctgtctctggctctgcccaggacaggaaggcgctaaccccgagttatcatagcacggagaggagcatcttcctgtaaatatcaatgatactgaaactataaaaaccaggggatatcacctggcaggggagatttcctgtgccatcggagaggggcttttggcctttccaaaagtcaaccaagaggtattttcagtatgttgtacttggaagatttttctttttctagtatgttcttctcaaatagttcctgcttaattgtctgtaccaagcgtcacgtacttgaaaaagcacaacgtccttgaaaacatgtctttaaatcacaaatttgaatgtggaacacagaattcaaatgttagatcgctaatttgaaaataatgaacatgaaatttgatttaaactcaactggatggaatgtttagttatattcaccatgtagccatcttaatttattgttaatctaaagcacacgaggactctcaacattggccttggataataagttcatataatttcagaaacatctgcagcactgtccccttttttaaaaaaatgtataaattctttgtttttattttattttacatatatgggcattttgatagtttatatgtctgtgtgccatgtgtgtgcctgatgcctttgggagccagaagggggatcagatttcctggaactagcattattgatgggtgcaggctgccatgtaggtgctggggactgaacttgggtcctttgcaaaagcagccagcacttctaacctctgagcagtctctcatcccccaagaacactgtctcttaaattcttgcacattggtagtacctaagacttgtccaacctaaaagtcaacagcaaacaggtgtgtaccattgtcacccaagtgtctgaggtcttgcagttactatccatgaccagatcactctatatccctcacagtgtgttggtttcagagataaaatgggcatgtattaattccttatggacataaagcaactgggctgtgtagagggctctgtggtaagagtgcttgctgtgttcataagtatgaagacttgagttttagtaactagtatcaacctagataatctttgccatggcagtcgtggctatatgctagcactgagtggggtgtttgaggggcagggagtggagacaggctagtctccaggagcttgccagcttagctcaaatggcaagctttagattaagtgagagaccctgtccaaagggaaaaaggcagaatatagcagaggcatgacccacagacatgctcacacatgcacacagcacacaagaaatgcatatacccaccaaacaaagccttatttaaaaaagaactatcaagtgagcattgccttgattttaaacaagataccatagagcacccacaaagcattgcttatcttggcaggtgaattcttaggagcttgagtgggtgcagatgacagggacatactcttctgtctcctgggtgaagaaggacttttcatttattgtgtgaaagtgaaatgtttgccttgctttcataagggtatgagtttggttcccagaacccatgggaaagacatagtaaaaagcacttctgaccccagctgtggggagacagagacaggaggacacttgggagtcaataccagctagtccaatctagttggtaagctccaggccaaagaccctgcctctaaggaagtgtatagcatttctgaggaagtttccaatggacatgcacagatggtcacatacactctcacgcctgcacacccatgtgcagctgcaggcattcacacagctgcatctgctgttagtcttatcagaaactatgattaatgatgaaactctagtgtaatgatcttcccaaagttcatttagaaaatggaaaacggatggaaacattaatatga
